(19) United States
(12) Patent Application Publication
(10) Pub. No.: US 2024/0287468 A1
(43) Pub. Date: Aug. 29, 2024

(54) BACTERIOPHAGES AGAINST VANCOMYCIN-RESISTANT ENTEROCOCCI

(71) Applicant: Ferring B.V., Hoofddorp (NL)

(72) Inventors: Kristin WANNERBERGER, Pully (CH); Alexander SULAKVELIDZE, Brookeville, MD (US)

(73) Assignee: Ferring B.V., Hoofddorp (NL)

(21) Appl. No.: 18/570,436

(22) PCT Filed: Jun. 14, 2022
(86) PCT No.: PCT/IB2022/055508

§ 371 Date: Dec. 14, 2023

Related U.S. Application Data
(60) Provisional application No. 63/210,555, filed on Jun. 15, 2021.

(51) Int. Cl. C12N 7/00; A61K 35/741; A61K 35/76; A61K 36/064; A61K 39/00; A61K 39/09; A61P 31/04

(52) U.S. Cl. CPC C12N 7/00; A61K 35/741; A61K 35/76; A61K 36/064; A61K 39/09; A61P 31/04; A61K 2039/521; C12N 2795/00021; C12N 2795/00032

(57) ABSTRACT

Described herein are bacteriophages that infect and lyse Vancomycin-Resistant Enterococci (VRE). The bacteriophages are useful, for example, for the prophylactic or therapeutic treatment of subjects infected with Enterococci, including VRE, or who are at risk of infection by Enterococci, including VRE, and for other uses described herein.

### CROSS-REFERENCE TO RELATED APPLICATIONS

[0001] This application claims priority to U.S. Provisional Application No. 63/210,555 filed Jun. 15, 2021, the entire contents of which are incorporated herein by reference.

### SEQUENCE LISTING

[0002] The instant application contains a Sequence Listing which has been submitted electronically in ASCII format and is hereby incorporated by reference in its entirety. Said ASCII copy, created on Jun. 11, 2021, is named 052209-0383_SL.txt and is 1,952,761 bytes in size.

### FIELD OF THE INVENTION

[0003] Described herein are bacteriophages that infect and lyse Vancomycin-Resistant Enterococci (VRE). The bacteriophages are useful, for example, for the prophylactic or therapeutic treatment of subjects infected with Enterococci, including VRE, or who are at risk of infection by Enterococci, including VRE, and for other uses described herein.

### BACKGROUND

### Bacteriophages

[0004] Bacteriophages are viruses that infect bacteria and lyse them as part of their replication/lytic cycle. Bacteriophages (or “phages” for short) derive their name from the Greek word “phago” meaning “to eat” or “bacteria eaters,” and were discovered by Felix D′Herelle in the first part of the twentieth century. Phages are specific for their targeted bacterial hosts, and do not infect human or other eukaryotic cells. Bacteriophages have been used therapeutically in humans since 1919 to target pathogenic bacteria. Early enthusiasm led to their use as both prophylaxis and therapy for diseases caused by bacteria. In the U.S. during the 1940s, Eli Lilly commercially manufactured six phage products for human use including preparations targeted against Staphylococci, Streptococci and other respiratory pathogens. With the advent of antibiotics, the therapeutic use of phages gradually fell out of favor in the U.S. and Western Europe and little research was conducted. However, bacteriophage therapy continued to be utilized in Eastern Europe.

### Vancomycin-Resistant Enterococci (VRE)

[0005] Enterococci are gram-positive, facultative anaerobic cocci found in soil, food, water, animals, birds, and insects. In humans, they are a common colonizing bacterial species in the human intestinal tract and the genitourinary tracts. Enterococci cause a variety of infections, including urinary tract infections, intra-abdominal and pelvic wound infections, endocarditis, and bacteremia. Vancomycin-resistant Enterococci (VRE) include strains from several different enterococcal species, with clinically significant VRE infections known to be caused by Enterococcus faecium and Enterococcus faecalis. Although the taxonomy of Enterococci has not been finalized, it is generally accepted that the genus consists of 19 species.

[0006] Antibiotic management of serious enterococcal infections has always been difficult due to the intrinsic resistance of the organisms to most antimicrobial agents. In the 1970s enterococcal infections were treated with combinations of a cell wall active agent such as penicillin and an aminoglycoside. However, during the 1980s enterococcal strains appeared with high levels of aminoglycoside resistance and resistance to penicillin, mediated both by a plasmid-encoded β-lactamase and by changes in penicillin binding proteins. Such organisms are called VRE because of their resistance to vancomycin; they are also resistant to the penicillin-aminoglyroside combination. Despite the release of two drugs to which VRE are susceptible (quinupristin/dalfopristin and linezolid (see, e.g., Plouffe, Clin. Infect Dis. 31 (Supp. 4): S144-49 (2000)), these microorganisms remain an important cause of morbidity and mortality in immunocompromised patients. Infections caused by VRE have emerged as a particularly serious problem among the elderly, immunocompromised, immunosuppressed and/or seriously ill patients in cancer centers and organ transplant units. VRE are easily transmitted within the hospital environment, and many hospital outbreaks have been reported. Although humans serve as the primary reservoir, the organisms can be readily isolated from the immediate environment of infected/colonized patients (e.g., bedding, furniture, and personal and household items).

[0007] Although attention has been focused on the impact of VRE infections on severely ill and immunocompromised patients, intestinal colonization with VRE is becoming relatively common among general hospital patients as well. Once colonized with VRE, a patient may remain colonized for life, and colonized persons who subsequently become immunocompromised, such as due to cancer chemotherapy or immunosuppressive therapies (such as may be adjunct to transplantation), are at risk for developing serious blood or wound infections with VRE.

### Treatments for VRE Infections

[0008] VRE bacteria are intrinsically resistant to many antimicrobial agents and developing new antibiotics effective against VRE has proven to be very difficult. The treatment of VRE infections with two antibiotics (quinupristin/dalfopristin and linezolid) approved by the FDA has only been moderately successful, and VRE strains resistant to quinupristin/dalfopristin and linezolid have already been identified. Thus, there remains an urgent need for effective agents against VRE, such as for reducing the risk of or preventing VRE infection and/or for treating patients already infected with VRE.

### SUMMARY OF THE INVENTION

[0009] The present invention provides bacteriophages that infect and lyse VRE. The bacteriophages can be formulated in compositions, such as over-the-counter (OTC) or pharmaceutical compositions, for use for reducing the risk of, preventing, or treating VRE infections, can be used to generate vaccine/bacterin compositions, and can be used in assays to detect VRE.

[0010] Thus, there are provided isolated bacteriophage that infect and lyse one or more strains of vancomycin-resistant enterococci (VRE), wherein the bacteriophage is of a strain selected from: (i) bacteriophage strain VREML237-2 deposited with the ATCC under Accession Number PTA-126934, or a variant strain thereof, wherein the variant strain has an average nucleotide identity across its genome (gANI) of at least 80% to said bacteriophage strain VREML237-2; (ii) bacteriophage strain VREML110-1 deposited with the ATCC under Accession Number PTA-126932, or a variant strain thereof, wherein the variant strain has a gANI of at least 80% to said bacteriophage strain VREML110-1; (iii) bacteriophage strain VREML105 deposited with the ATCC under Accession Number PTA-126931, or a variant strain thereof, wherein the variant strain has a gANI of at least 80% to said bacteriophage strain VREML105; (iv) bacteriophage strain VREML202-1 deposited with the ATCC under Accession Number PTA-126933, or a variant strain thereof, wherein the variant strain has a gANI of at least 80% to said bacteriophage strain VREML202-1; (v) bacteriophage strain VREML85-2 deposited with the ATCC under Accession Number PTA-126930, or a variant strain thereof, wherein the variant strain has a gANI of at least 80% to said bacteriophage strain VREML85-2; (vi) bacteriophage strain VREML110-2 deposited with the ATCC under Accession Number PTA-127012 or a variant strain thereof, wherein the variant strain has a gANI of at least 80% to said bacteriophage strain VREML110-2; (vii) bacteriophage strain VREML237-1 deposited with the ATCC under Accession Number PTA-127016 or a variant strain thereof, wherein the variant strain has a gANI of at least 80% to said bacteriophage strain VREML237-1; (viii) bacteriophage strain VREML85-1 deposited with the ATCC under Accession Number PTA-127011 or a variant strain thereof, wherein the variant strain has a gANI of at least 80% to said bacteriophage strain VREML85-1; (ix) bacteriophage strain VREML 137-2 deposited with the ATCC under Accession Number PTA-127013 or a variant strain thereof, wherein the variant strain has a gANI of at least 80% to said bacteriophage strain VREML137-2; (x) bacteriophage strain VREML202-2 deposited with the ATCC under Accession Number PTA-127015 or a variant strain thereof, wherein the variant strain has a gANI of at least 80% to said bacteriophage strain VREML202-2; and (xi) bacteriophage strain VREML 139 deposited with the ATCC under Accession Number PTA-127014 or a variant strain thereof, wherein the variant strain has a gANI of at least 80% to said bacteriophage strain VREML 139.

[0011] The isolated bacteriophage may be a variant strain of one of said deposited bacteriophage strains that has a gANI of at least 90% to the deposited bacteriophage strain. The isolated bacteriophage may be a variant strain of one of said deposited bacteriophage strains that has a gANI of at least 95% to the deposited bacteriophage strain. The isolated bacteriophage may be a variant strain of one of said deposited bacteriophage strains that has an RFLP DNA profile substantially equivalent to the RLFP DNA profile of the deposited bacteriophage strain.

[0012] Also provided are isolated progeny bacteriophages of a deposited bacteriophage strain as disclosed herein, wherein the isolated progeny bacteriophage has a gANI of ≥80% relative to the deposited bacteriophage strain. The isolated progeny bacteriophage may have a gANI of ≥95% relative to the deposited bacteriophage strain. The isolated progeny bacteriophage may habe a gANI of ≥98% or ≥99.9% relative to the deposited bacteriophage strain.

[0013] Also provided are compositions comprising bacteriophages of one or more of the bacteriophage strains disclosed herein and a pharmaceutically acceptable carrier. The one or more bacteriophage strains in the composition may comprise or consist of (i) bacteriophage strain VREML237-2 deposited with the ATCC under Accession Number PTA-126934, or a variant strain thereof, wherein the variant strain has a gANI of at least 80% to said bacteriophage strain VREML237-2; (ii) bacteriophage strain VREML110-1 deposited with the ATCC under Accession Number PTA-126932, or a variant strain thereof, wherein the variant strain has a gANI of at least 80% to said bacteriophage strain VREML110-1; (iii) bacteriophage strain VREML105 deposited with the ATCC under Accession Number PTA-126931, or a variant strain thereof, wherein the variant strain has a gANI of at least 80% to said bacteriophage strain VREML105; (iv) bacteriophage strain VREML202-1 deposited with the ATCC under Accession Number PTA-126933, or a variant strain thereof, wherein the variant strain has a gANI of at least 80% to said bacteriophage strain VREML202-1; and (v) bacteriophage strain VREML85-2 deposited with the ATCC under Accession Number PTA-126930, or a variant strain thereof, wherein the variant has a gANI of at least 80% to said bacteriophage strain VREML85-2. The one or more bacteriophage strains in the composition may comprise or consist of (i) bacteriophage strain VREML237-2; (ii) bacteriophage strain VREML110-1; (iii) bacteriophage strain VREML105; (iv) bacteriophage strain VREML202-1; and (v) bacteriophage strain VREML85-2.

[0014] The composition may be provided in an oral dosage form, optionally provided with an enteric coating, optionally in a form selected from tablets, hard gel capsules, soft gel capsules, dragees, powders, granules, solutions, suspensions, dispersions, syrups, and microgels. The composition may be provided in a rectal dosage form, optionally in a suppository, enema, rectal foam, lotion, or gel. The composition may be provided in a vaginal dosage form, optionally in a suppository, cream vaginal foam, lotion, or gel. The composition may be provided in a topical dosage form, optionally in an emulsion, cream, lotion, gel, or spray. The composition may be provided in a pulmonary dosage form, optionally in a powder, aerosol, nebulizer, or insufflator composition. The composition may be provided in an injectable dosage form.

[0015] In any embodiments, the composition optionally further comprises a probiotic. The probiotic may comprise a probiotic bacteria, such as one or more selected from the group consisting of L. acidophilus, L. rhamnosus, L. gasseri, L. reuteri, L. bulgaricus, L. plantarum, L. johnsonii, L. paracasei, L. casei, L. salivarius, L. lactis, B. bifidum, B. longum, B. breve, B. infantis, B. lactis, B. adolescentis, Streptococcus thermophilus, Bacillus cerus, Bacillus subtilis, and any combinations thereof. The probiotic may comprise a probiotic yeast, such one or more of Saccharomyces cerevisiae, Saccharomyces boulardii, Saccharomyces cerevisiae var. boulardii, Issatchenkia occidentalis, Lachancea thermotolerans, Metschnikowia ziziphicola, Torulaspora delbrueckii, and any combination thereof.

[0016] Also provided are methods of reducing the risk of, or preventing, or treating VRE colonization or infection in a subject in need thereof, or for modulating a human subject's microbiome, comprising administering to the subject a bacteriophage or composition as disclosed herein.

[0017] Also provided are the bacteriophages and compositions as disclosed herein for use in reducing the risk of, or preventing, or treating VRE colonization or infection in a subject in need thereof, or for modulating a human subject's microbiome.

[0018] Also provided are uses of a bacteriophage or composition as disclosed herein in the preparation of a medicament for reducing the risk of, or preventing, or treating VRE colonization or infection in a subject in need thereof, or for modulating a human subject's microbiome.

[0019] In accordance with any such method, composition for use, or use, the subject may be at risk of colonization or infection by VRE or be colonized or infected by VRE, and optionally may be an immunosuppressed or immunocompromised subject. In accordance with any such method, composition for use, or use, the subject may suffer from VRE gut colonization and the method may be effective to reduce or eliminate VRE gut colonization.

[0020] In some embodiments of a method, bacteriophage or composition for use, or use as disclosed herein, the treatment further comprises administering a probiotic to the subject, optionally wherein the probiotic is provided in the same composition as the bacteriophage.

[0021] In some embodiments of a method, bacteriophage or composition for use, or use as disclosed herein, the bacteriophage or composition or medicament is administered orally.

[0022] In some embodiments of a method, bacteriophage or composition for use, or use as disclosed herein, the bacteriophage, composition, or medicament is administered rectally.

[0023] In some embodiments of a method, bacteriophage or composition for use, or use as disclosed herein, the bacteriophage, composition, or medicament is administered topically.

[0024] In some embodiments of a method, bacteriophage or composition for use, or use as disclosed herein, bacteriophage, composition, or medicament is administered vaginally.

[0025] Also provided are compositions comprising a lytic enzyme produced by a bacteriophage as disclosed herein.

[0026] Also provided are compositions comprising a derivative product of bacteriophage as disclosed herein, wherein the derivative product has activity against VRE or encodes a product that has activity against VRE, optionally wherein the derivative product is one or more selected from DNA, cDNA, mRNA and synthetic polynucleotide sequences, DNA/RNA hybrids, and anti-sigma factor genes and expression products thereof.

[0027] Also provided are vaccines comprising a VRE bacterial lysate obtained by lysing a VRE strain with a bacteriophage as disclosed herein or a lytic enzyme thereof; methods for vaccinating a subject against VRE infection comprising administering to the subject such a vaccine; such VRE bacterial lysates for use in vaccinating a subject against VRE infection, and uses of such VRE bacterial lysates in the preparation of a medicament for vaccinating a subject against VRE infection.

[0028] Also provided are methods for detecting VRE in a sample, comprising treating the sample with a bacteriophage as disclosed herein or a lytic enzyme thereof, thereby specifically inducing release of a measurable VRE bacterial product, and measuring the released VRE bacterial product, optionally wherein the released VRE bacterial product is one or more of adenosine triphosphate (ATP) and protein kinase (AKT). In some embodiments, the sample is a fecal sample obtained from a subject.

### BRIEF DESCRIPTION OF THE DRAWINGS

[0029] FIG. 1. shows reference DNA RFLP profiles of the bacteriophages described herein.

[0030] FIG. 2. shows results of an assessment of the efficacy of a bacteriophage cocktail as described herein in an in vitro human gut simulator model.

### DETAILED DESCRIPTION OF THE INVENTION

[0031] As noted above, described herein are bacteriophages that target (i.e., infect and lyse, e.g., produce lytic infection in) VRE. The bacteriophages can be formulated in compositions, such as over-the-counter (OTC) or pharmaceutical compositions, for use for reducing the risk of, preventing, or treating VRE infections, can be used to generate vaccine/bactrin compositions, and can be used in assays to detect VRE. The bacteriophages and compositions comprising them are useful for preventing or reducing infection by VRE, including preventing or reducing gut colonization by VRE, thereby preventing or reducing the risk of infection by VRE or treating VRE. Without being bound by theory, it is understood that therapy using the bacteriophages and compositions described herein are safe and effective through specific and targeted prevention or reduction of VRE infection, and thereby reduce invasive disease due to VRE and reduce the incidence, prevalence and transmission of VRE infection, while maintaining a healthy gut microbiome by specifically targeting VRE and avoiding side effects associated with broad-spectrum antibiotic therapies.

### Definitions

[0032] Technical and scientific terms used herein have the meanings commonly understood by one of ordinary skill in the art to which the present invention pertains, unless otherwise defined. Any suitable materials and/or methods known to those of ordinary skill in the art can be utilized in carrying out the present invention in view of the guidance provided herein; however, specific materials and methods are described for illustrative purposes. Materials, reagents and the like to which reference is made in the following description and examples are obtainable from commercial sources, unless otherwise noted.

[0033] As used herein, the singular forms “a,” “an,” and “the” designate both the singular and the plural, unless expressly stated to designate the singular only.

[0034] As used herein, “about” when used with a numerical value means the numerical value stated as well as plus or minus 10% of the numerical value. For example, “about 10” should be understood as both “10” and “9-11.”

[0035] As used herein, a phrase in the form “A/B” or in the form “A and/or B” means (A), (B), or (A and B); a phrase in the form “at least one of A, B, and C” means (A), (B), (C), (A and B), (A and C), (B and C), or (A, B, and C).

[0036] As used herein, the term “comprising” means that the described compositions, methods, or kits include at least the stated elements, and may include other elements that are not specified.

[0037] As used herein, the phrases “effective amount” and “therapeutically effective amount” used with reference to a therapeutically active agent (e.g., a phage) means an amount that provides the specific pharmacological effect for which the agent is administered to a subject in need of such treatment, e.g., to reduce the risk of, prevent, or reduce VRE infection (or VRE colonization). It is emphasized that a therapeutically effective amount will not always be effective to prevent or reduce VRE infection (or VRE colonization) in a given subject, even though such amount is deemed to be a therapeutically effective amount by those of skill in the art. The therapeutically effective amount may vary based on the specific active agent, route of administration and dosage form, age and weight of the subject, and/or the subject's condition, including the type and severity of the VRE infection.

[0038] The terms “individual,” “subject,” and “patient” are used interchangeably herein, and refer to any individual mammalian subject, including human subjects, including male and female human subjects.

[0039] “Preventing” as used herein means to reduce the risk of VRE infection or VRE colonization or prevent VRE infection or VRE colonization, or to reduce the level of VRE infection or VRE colonization, in a subject in need thereof.

[0040] “Treating” as used herein means to reduce the level of VRE infection in a subject in need thereof, including to reduce the VRE infection to undetectable levels or to eliminate VRE colonization.

[0041] The term VRE “colonization” is used herein to refer to the presence of VRE in a subject that is not necessarily causing disease in the subject.

[0042] The term VRE “infection” is used herein to refer to VRE invasion of a subject's tissue that is causing disease in the subject.

[0043] A “Vancomycin-resistant enterococci (VRE) strain” as used herein refers to a VRE strain (isolate) with a minimum inhibitory concentration to vancomycin of at least 16 μg/ml, which may be assessed by an assay as described in the examples below. See, e.g., National Committee for Clinical Laboratory Procedures, “Methods for Dilution Antimicrobial Susceptibility Tests for Bacteria that Grow Aerobically.” (3rd ed., 1993) (Nat. Committee for Clin. Lab. Standards, Villanova Pa.); National Committee for Clinical Laboratory Standards, “Performance Standards for Antimicrobial Disk Susceptibility Tests.” (5th ed., 1993) (Nat. Committee for Clin. Lab. Standards, Villanova Pa.). VREs may belong to the species Enterococcus faecium, Enterococcus faecalis, E. gallinarum, E. casseliflavus, E. durans, E. avium, and E. raffinosis. VRE targeted by the phages described herein typically may present in one or more of the gastrointestinal tract, skin, and genital tract, but can also be found in other parts of the body. Non-limiting examples of diseases and conditions that may be caused by VRE include bacteremia (e.g., sepsis), meningitis, pneumonia, endocarditis, urinary tract infections, intra-abdominal infections (e.g., peritonitis), pelvic infections, skin and soft tissue infections (including wound infections), and nosocomial infections.

[0044] As used herein, a “variant” strain of a bacteriophage strain described herein has at least 80% average nucleotide identity across its genome (“gANI”) to a reference bacteriophage strain. gANI is a similarity index between a given pair of genomes. Typically, scholars would identify organisms with a gANI≥95% as belonging to the “Same Species.” See Olm M., “Are these microbes the ‘same’?” microBEnet (2; 2017) (available at microbe.net/2017/02/15/are-these-microbes-the-same/), and Jain et al. (Jain et al. Nature Comm. 9(1):5114 (2018). A variant strain having at least 90% gANI to the reference strain is presumed and deemed to have the same phenotypic characteristics as said reference bacteriophage strain. A “variant” strain may be obtained independently of the reference strain, may be a progeny of the reference strain, or may be a recombinant derivative of the reference strain (e.g., made recombinantly using the reference strain or one or more or all of its genomic sequences as starting material).

[0045] As used herein, “isolated” as used with reference to a bacteriophage means the bacteriophage has been removed from its original environment in which it naturally occurs. An “isolated” bacteriophage may have been purified from, cultivated separately from, or cultured separately from the environment in which it is naturally located.

### Bacteriophages

[0046] Provided herein are isolated bacteriophages of each of the following (eleven) bacteriophage strains and variant strains thereof having at least 80%, at least 90%, or at least 95% gANI to the deposited strains. The genomic sequence of each strain is set forth in the Sequence Listing incorporated herein by reference:
[0047] VREML237-2 (SEQ ID NO: 1) deposited at the ATCC under Accession Number PTA-126934
[0048] VREML110-1 (SEQ ID NO: 2) deposited at the ATCC under Accession Number PTA-126932
[0049] VREML 105 (SEQ ID NO: 3) deposited at the ATCC under Accession Number PTA-126931
[0050] VREML202-1 (SEQ ID NO: 4) deposited at the ATCC under Accession Number PTA-126933
[0051] VREML85-2 (SEQ ID NO: 5) deposited at the ATCC under Accession Number PTA-126930
[0052] VREML110-2 (SEQ ID NO: 6) deposited at the ATCC under Accession Number PTA-127012
[0053] VREML237-1 (SEQ ID NO: 7) deposited at the ATCC under Accession Number PTA-127016
[0054] VREML85-1 (SEQ ID NO: 8) deposited at the ATCC under Accession Number PTA-127011
[0055] VREML 137-2 (SEQ ID NO: 9) deposited at the ATCC under Accession Number PTA-127013
[0056] VREML202-2 (SEQ ID NO: 10) deposited at the ATCC under Accession Number PTA-127015
[0057] VREML 139 (SEQ ID NO: 11) deposited at the ATCC under Accession Number PTA-127014

[0058] These isolated deposited strains and variants thereof having at least 80%, at least 90%, or at least 95% gANI to the deposited strains are referred to collectively in the discussion herein as bacteriophages (or phages) “as described herein.”

[0059] As illustrated in the examples, each of these strains specifically targets (infects and lyses) one or more strains of VRE, and are useful for reducing the risk of infection, preventing infection, and/or treating infection by one or more strains of VRE, including for reducing or eliminating colonization by one or more strains of VRE, and for other uses described herein. For example, as illustrated in the examples, each of these strains specifically targets and lyses one or more of 214 VRE strains isolated from human subjects, and one or more of five reference Enterococci isolates: E401 (ATCC 51299), E403 (ATCC 19433), E618 (ATCC 700221), E400 (ATCC 29212) and E402 (ATCC 11823).

[0060] As noted above, as used herein “variants” (or “variant strains”) include progeny obtained by cultivating bacteriophages of the deposited strains, as illustrated in the examples below. Restriction Fragment Length Polymorphism (RFLP) can be used to identify bacteriophage strains or their progeny. The progeny strain may have a substantially equivalent DNA RFLP profile to the DNA RFLP profile of the original bacteriophage strain as defined in Tenover et al., J. Clin. Microbiol. 33(9): 2233-39 (1995). As reported in Tenover, when genomes of identically propagated organisms are electrophoretically analyzed following restriction enzyme digestion, some variation in RFLP profiles may be seen. Tenover describes a system for interpreting chromosomal DNA RFLP profiles using Pulsed-Field Gel Electrophoresis (PFGE). In particular, Tenover sets forth various categories of genetic and epidemiologic relatedness including for identifying organisms that are “indistinguishable” from or “closely related” to each other. As used herein, a bacteriophage strain is “substantially equivalent” to a reference bacteriophage strain if the RLFP profiles are “indistinguishable” or “closely related” under the criteria of Tenover, supra.

[0061] Thus, a “progeny” strain may have a DNA RFLP profile substantially equivalent to the DNA RFLP profile of the parent deposited bacteriophage strain, as illustrated in the examples. A progeny may have ≥80% gANI to the parent deposited bacteriophage. A progeny may have ≥90% gANI to the parent deposited bacteriophage. A progeny may have ≥95% gANI to the parent deposited bacteriophage. A progeny may have ≥98% gANI to the parent deposited bacteriophage. A progeny may have ≥99% gANI to the parent deposited bacteriophage.

[0062] As noted above, variant strains having at least 90% gANI to a reference bacteriophage strain are presumed and deemed to have the same phenotypic characteristics as the reference bacteriophage strain. Thus, the present disclosure includes variants of these deposited strains having at least 90% gANI to a reference deposited strain and other variants having the same phenotypic characteristics as a deposited strain.

[0063] Also provided herein are derivative products of an isolated bacteriophage as described herein. A “derivative product” as used herein refers to substances that constitute subunits or expression products of the bacteriophages described herein, including (but not limited to) nucleic acids, partial or complete genes, lytic enzymes and other gene expression products, and other structural components of a bacteriophage, such as polyribonucleotide(s) and polydeoxyribonucleotide(s), including modified or unmodified bacteriophage DNA, cDNA, mRNA and synthetic polynucleotide sequences, as well as DNA/RNA hybrids, such as derivative products that have activity against VRE or encode products that have activity against VRE. Thus, one or more derivative products of the bacteriophages described herein may be included in the compositions described herein and used in the methods described herein.

[0064] Anti-sigma factor genes and expression products thereof are examples of such derivative products. One or more of the phages described herein may encode an anti-sigma factor gene that inhibits bacterial transcriptional activity of the host (target) VRE. See, e g., Hughes, et al. Ann. Rev Microbiol 52:231-86 (1998). The anti-sigma factor gene grants such phages an enhanced ability to inhibit transcription within target (VRE) bacterial cell, thereby enhancing the phage's ability to lyse the target bacterial cell. Thus, anti-sigma factor genes and expression products thereof are examples of derivative products that may be included in the compositions described herein and used in the prophylactic and therapeutic treatment methods described herein, such as to enhance the potency of the composition and/or the efficacy of the method.

[0065] Lytic enzymes are another example of phage derivative products described herein. The bacteriophages described herein encode one or more lytic enzymes involved in lysing the host (target) VRE. Phage lytic enzymes are produced by bacteriophages either as part of their virion to facilitate bacterial infection through local peptidoglycan degradation, or as soluble proteins to induce massive cell lysis at the end of the lytic replication cycle. See, e.g., Briers, Viruses 11(2): 113 (2019). Lytic enzymes can cause rapid lysis of their targeted bacteria, resulting in significant reduction or elimination of the targeted bacterium's levels. In addition to enhancing the potency or efficacy of the compositions and prophylactic and therapeutic treatment methods described herein, lytic enzymes can be used in detection assays for rapid identification of specific bacteria. See, e.g., Nelson, et al., “Using bacteriophage lytic enzymes as a diagnostic tool for rapid identification of specific bacteria.” In American Society for Microbiology General Meeting, Salt Lake City, Utah (2002). Lytic enzymes for use in the compositions and methods described herein may be isolated from cultures of the phages described herein, or prepared by recombinant techniques. Thus, lytic enzymes may be included in the compositions described herein and used in the prophylactic and therapeutic treatment methods and detection methods described herein, such as to enhance the potency of the composition and/or the efficacy of the treatment method, or to detect specific target VRE bacteria.

### Compositions

[0066] Also provided herein are compositions comprising one or more of the isolated bacteriophage strains described herein. Compositions comprising two or more isolated bacteriophage strains as described herein are referred to herein as a bacteriophage “cocktail.” As noted above, the compositions may be OTC compositions or pharmaceutical compositions. For example, the composition may be a pharmaceutical composition, dietary supplement, nutraceutical composition, nutritional supplement, or probiotic composition.

[0067] A bacteriophage cocktail may comprise any combination of two or more of the isolated bacteriophage strains described herein, including any two or more of the following (eleven) deposited strains (or variants thereof having at least 80%, at least 90%, or at least 95% gANI to the deposited strains, including variants having the same phenotypic characteristics, as determined by phenotypic assay or by having at least 90% gANI to a deposited bacteriophage strain):
[0068] VREML237-2 (SEQ ID NO: 1) deposited at the ATCC under Accession Number PTA-126934
[0069] VREML110-1 (SEQ ID NO: 2) deposited at the ATCC under Accession Number PTA-126932
[0070] VREML 105 (SEQ ID NO: 3) deposited at the ATCC under Accession Number PTA-126931
[0071] VREML202-1 (SEQ ID NO: 4) deposited at the ATCC under Accession Number PTA-126933
[0072] VREML85-2 (SEQ ID NO: 5) deposited at the ATCC under Accession Number PTA-126930
[0073] VREML110-2 (SEQ ID NO: 6) deposited at the ATCC under Accession Number PTA-127012
[0074] VREML237-1 (SEQ ID NO: 7) deposited at the ATCC under Accession Number PTA-127016
[0075] VREML85-1 (SEQ ID NO: 8) deposited at the ATCC under Accession Number PTA-127011
[0076] VREML137-2 (SEQ ID NO: 9) deposited at the ATCC under Accession Number PTA-127013
[0077] VREML202-2 (SEQ ID NO: 10) deposited at the ATCC under Accession Number PTA-127015
[0078] VREML 139 (SEQ ID NO: 11) deposited at the ATCC under Accession Number PTA-127014.

[0079] As one specific example, a bacteriophage cocktail may comprise strains of two or more or all of the following (five) isolated bacteriophage strains (or variants thereof having at least 80%, at least 90%, or at least 95% gANI to the deposited strains, including variants having the same phenotypic characteristics, as determined by phenotypic assay or by having at least 90% gANI to a deposited bacteriophage strain):
[0080] VREML237-2 (SEQ ID NO: 1) (deposited at the ATCC under Accession Number PTA-126934)
[0081] VREML110-1 (SEQ ID NO: 2) (deposited at the ATCC under Accession Number PTA-126932)
[0082] VREML 105 (SEQ ID NO: 3) (deposited at the ATCC under Accession Number PTA-126931)
[0083] VREML202-1 (SEQ ID NO: 4) (deposited at the ATCC under Accession Number PTA-126933) and
[0084] VREML85-2 (SEQ ID NO: 5) (deposited at the ATCC under Accession Number PTA-126930)

[0085] As a further specific example, a bacteriophage cocktail may comprise strains of each of the following (five) isolated bacteriophage strains (or variants thereof having at least 80%, at least 90%, or at least 95% gANI to the deposited strains, including variants having the same phenotypic characteristics, as determined by phenotypic assay or by having at least 90% gANI to a deposited bacteriophage strain):
[0086] VREML237-2 (SEQ ID NO: 1) (deposited at the ATCC under Accession Number PTA-126934)
[0087] VREML110-1 (SEQ ID NO: 2) (deposited at the ATCC under Accession Number PTA-126932)
[0088] VREML105 (SEQ ID NO: 3) (deposited at the ATCC under Accession Number PTA-126931)
[0089] VREML202-1 (SEQ ID NO: 4) (deposited at the ATCC under Accession Number PTA-126933) and
[0090] VREML85-2 (SEQ ID NO: 5) (deposited at the ATCC under Accession Number PTA-126930).

[0091] As a further specific example, a bacteriophage cocktail may comprise strains of each of the following (five) isolated bacteriophage strains:
[0092] VREML237-2 (SEQ ID NO: 1) (deposited at the ATCC under Accession Number PTA-126934)
[0093] VREML110-1 (SEQ ID NO: 2) (deposited at the ATCC under Accession Number PTA-126932)
[0094] VREML 105 (SEQ ID NO: 3) (deposited at the ATCC under Accession Number PTA-126931)
[0095] VREML202-1 (SEQ ID NO: 4) (deposited at the ATCC under Accession Number PTA-126933) and
[0096] VREML85-2 (SEQ ID NO: 5) (deposited at the ATCC under Accession Number PTA-126930).

[0097] The specific combination of isolated bacteriophage strains described herein used in a given bacteriophage cocktail can be selected based on the target strain(s) of VRE. For example, an isolated bacteriophage strain or combination of two or more isolated bacteriophage strains described herein can be tested in vitro against the target strain(s) of VRE to confirm efficacy prior to using strain or the combination in a cocktail to treat a specific subject or group of subjects. Suitable screening methodologies are known in the art and illustrated in the examples herein. For use in such testing, target strain(s) of VRE can be obtained from clinical specimens obtained from a specific subject or group of subjects, from the environment of a specific subject or group of subjects, or identified and obtained from other sources. Suitable methodologies are known in the art and illustrated in the examples herein.

[0098] Also provided are compositions that comprise isolated bacteriophage strains bacteriophages of one or more bacteriophage strains as described herein and further comprise one or more probiotics. As used herein, a “probiotic” includes probiotic bacteria and probiotic yeast. Suitable probiotic bacteria are known in the art and include Lactobacillus species (such as L. acidophilus, L. rhamnosus, L. gasseri, L. reuteri, L. bulgaricus, L. plantarum, L. johnsonii, L. paracasei, L. casei, L. salivarius, and L. lactis), Bifidobacterium species (such as B. bifidum, B. longum, B. breve, B. infantis, B. lactis, and B. adolescentis), and Streptococcus thermophilus, Bacillus cerus, and Bacillus subtilis. Suitable probiotic yeast are known in the art and include Saccharomyces cerevisiae, Saccharomyces boulardii, Saccharomyces cerevisiae var. boulardii, Issatchenkia occidentalis, Lachancea thermotolerans, Metschnikowia ziziphicola, and Torulaspora delbrueckii.

[0099] Thus, in some embodiments, a composition as described herein comprises one or more isolated bacteriophage strains bacteriophage strains as described herein and one or more probiotics. In specific embodiments, a composition as described herein comprises one or more isolated bacteriophage strains bacteriophage strains as described herein and one or more strains of probiotic bacteria. In other specific embodiments, a composition as described herein comprises one or more isolated bacteriophage strains bacteriophage strains as described herein and one or more strains of probiotic yeast. In yet other specific embodiments, a composition as described herein comprises one or more isolated bacteriophage strains bacteriophage strains as described herein and one or more strains of probiotic bacteria and one or more strains of probiotic yeast. Without wanting to be bound by theory, it is believed that the positive health impact of the VRE bacteriophages described herein may be further enhanced when combined with a probiotic.

[0100] As one specific example, a composition as described herein may comprise two or more or all of the following isolated bacteriophage strains bacteriophage strains (or variants thereof as described above) and one or more probiotics:
[0101] VREML237-2 (SEQ ID NO: 1) (deposited at the ATCC under Accession Number PTA-126934)
[0102] VREML110-1 (SEQ ID NO: 2) (deposited at the ATCC under Accession Number PTA-126932)
[0103] VREML105 (SEQ ID NO: 3) (deposited at the ATCC under Accession Number PTA-126931)
[0104] VREML202-1 (SEQ ID NO: 4) (deposited at the ATCC under Accession Number PTA-126933) and
[0105] VREML85-2 (SEQ ID NO: 5) (deposited at the ATCC under Accession Number PTA-126930).

[0106] The one or more probiotics may be one or more probiotic bacteria selected from Lactobacillus species (such as L. acidophilus, L. rhamnosus, L. gasseri, L. reuteri, L. bulgaricus, L. plantarum, L. johnsonii, L. paracasei, L. casei, L. salivarius, and L. lactis), Bifidobacterium species (such as B. bifidum, B. longum, B. breve, B. infantis, B. lactis, and B. adolescentis), and Streptococcus thermophilus, Bacillus cerus, and Bacillus subtilis; one or more probiotic yeast selected from Saccharomyces cerevisiae, Saccharomyces boulardii, Saccharomyces cerevisiae var. boulardii, Issatchenkia occidentalis, Lachancea thermotolerans, Metschnikowia ziziphicola, and Torulaspora delbrueckii, or any combination thereof.

[0107] As noted above, in any embodiments, a composition comprising an isolated bacteriophage and probiotic as described herein may be an OTC composition or a pharmaceutical composition.

[0108] Additionally or alternatively, a composition as described herein may comprise one or more phage derivative products as described herein. In some embodiments, a composition as described herein includes one or more lytic enzymes produced by one or more of the bacteriophages formulated in the composition. In some embodiments, a composition as described herein additionally or alternatively comprises one or more anti-sigma factor genes or expression products thereof of one or more of the bacteriophages formulated in the composition. As noted above, in any embodiments, a composition comprising a bacteriophage and a phage derivative product (such as lytic enzyme(s)) as described herein may be an OTC composition or a pharmaceutical composition.

[0109] An OTC or pharmaceutical composition as described herein comprises the isolated bacteriophage(s) (and, in some embodiments, probiotic(s) and/or phage derivative products such as lytic enzyme(s)) and one or more pharmaceutically acceptable carriers, and, optionally one or more pharmaceutically acceptable excipients. Suitable carriers and excipients for bacteriophage(s) are known in the art. Typically, a pharmaceutically acceptable carrier is a pharmaceutically-acceptable, non-toxic carrier, filler, or diluent, suitable for use as a vehicle for formulating pharmaceutical compositions for administration to the target patient (animal or human) by the intended route of administration.

[0110] Pharmaceutically acceptable excipients, also referred to as auxiliary agents or accessory ingredients, encompass those conventionally used in pharmaceutical compositions for administration to the target patient (animal or human) by the intended route of administration, such as, but not limited to, matrix-forming agents, thickeners, binders, lubricants, pH adjusting agents, protecting agents, viscosity enhancers, wicking agents, disintegrants, including non-effervescent and effervescent disintegrants, surfactants, antioxidants, wetting agents, colorants, flavoring agents, taste-masking agents, sweeteners, preservatives and so forth. In addition to being pharmaceutically acceptable, the auxiliary agents typically will be selected to be compatible with the other ingredients of the composition, including the bacteriophage(s) and probiotic(s) (if present).

[0111] The OTC and pharmaceutical compositions described herein may be formulated for any suitable route of administration (which may depend on the site of VRE colonization or infection). Phage compositions for different routes of administration have been disclosed. See, e.g., Qadir et al., Brazilian J. Pharm. Sci. (2018) 54(1). For example, phages can be formulated for routes of administration including oral, buccal, sublingual, rectal, nasal, topical, otic, vaginal, bronchial, pulmonary, or parenteral (including subcutaneous, intramuscular, intravenous, intradermal, intraperitoneal, intrapleural, intravesicular and intrathecal) administration, or for administration via an implant, or urinary tract rinse or catheter. The composition or route of administration may be selected to provide a targeted effect of one or more bacteriophages described herein, and may depend on the site(s) of colonization or infection.

[0112] The OTC and pharmaceutical compositions may be prepared by any suitable method for making the dosage form at issue, with such methods being well known in the art of pharmacy. Such methods typically will include the step of bringing in association one or more bacteriophages as described herein (and, optionally, one or more probiotics and/or phage derivative products such as lytic enzyme(s)) and a pharmaceutically acceptable carrier, and, optionally, one or more pharmaceutically acceptable auxiliary agents.

[0113] In some embodiments, a composition as described herein is formulated for oral administration and administered orally. Dosage forms for OTC and pharmaceutical compositions suitable for oral administration are known in the art, and include discrete dosage forms such as tablets (including chewable tablets), hard gel capsules containing a dry phage-containing composition, soft liquid gel capsules containing a liquid phage-containing composition, and dragees, and bulk dosage forms such as powders, granules, solutions, suspensions, dispersions, syrups, microgels, and the like.

[0114] Dosage forms of OTC and pharmaceutical compositions formulated for oral administration may be formulated to protect the phages from the acidic environment of the stomach. For example, compositions formulated for oral administration may be provided with or comprise a coating, such as an enteric coating or delayed release coating (such as in the form of coated tablets or capsules, or granules provided with a coating) to protect the bacteriophage (and, optionally the probiotic(s) and/or phage derivative products such as lytic enzyme(s)) and maintain viability during passage through the acidic environment of stomach, or may be microencapsulated (such as in alginate-chitosan microspheres). Suitable coating and microencapsulation materials are known in the art. Additionally or alternatively, compositions formulated for oral administration be may be formulated with or administered with an agent that reduces stomach acids (e.g., a gastric acid reducing agent), such as gastric acid neutralizing agent (e.g., bicarbonate, such as sodium bicarbonate), or a proton pump inhibitor (e.g., omeprazole).

[0115] Additionally, or alternatively, such compositions may be provided with or comprise a delayed release coating to provide release of viable phages (and, optionally the probiotic(s) and/or phage derivative products such as lytic enzyme(s)) at a desired site of release, such as in the small intestine.

[0116] For example, a composition as described herein formulated for oral administration may comprise one or more of the following ingredients: water, such as deionized water, pharmaceutical grade water, or mineral water; sodium chloride, sodium bicarbonate; a buffer solution (such as Tris-HCl at pH 7.0-7.5); sweeteners, such as sucrose (e.g., a 5% sucrose solution), trehalose, maltodextrin, glycerol, dextran, and sorbitol, cellulose; thickeners, such as tapioca, dextrin, gellan gum, and gelatin; and other excipients such as hydroxypropyl methylcellulose, poly(acrylic acid) (“PAA”), poly(ethyleneglycol) (“PEG”), and casein, and combinations of any two or more thereof.

[0117] As one specific, non-limiting example, a composition as described herein may be formulated in a 0.9% sodium chloride solution, optionally to provide about 1×10¹⁰ PFU phage in 1 mL of a 0.9% sodium chloride solution. Such a composition optionally may be mixed with bicarbonate water, such as 15-50 mL bicarbonate water, just prior to administration, for consumption.

[0118] In alternative embodiments, a composition as described herein is formulated for rectal administration. Dosage forms for OTC and pharmaceutical compositions suitable for rectal administration are known in the art, and may include a suppository, rectal foam, lotion, gel or enema for rectal administration.

[0119] In alternative embodiments, a composition as described herein is formulated for vaginal administration. Dosage forms for OTC and pharmaceutical compositions suitable for vaginal administration are known in the art, and may include a suppository, cream, vaginal foam, lotion, gel, vaginal rinse, or catheter for vaginal administration.

[0120] In alternative embodiments, a composition as described herein is formulated for parenteral administration, such as by infusion or injection, including subcutaneous, intramuscular, intravenous, intradermal, intraperitoneal, intrapleural, intravesicular, and intrathecal injection. Compositions suitable for parenteral administration are known in the art, and may include sterile aqueous and non-aqueous compositions formulated for infusion or injection. Such compositions may be provided in unit-dose or multi-dose containers, for example pre-filled syringes, sealed vials, sealed ampoules, or sealed pouches. Such compositions may be ready-to-use, or may be freeze-dried (lyophilized) or spray-dried compositions that are reconstituted prior to use with a sterile liquid carrier, for example, water.

[0121] In alternative embodiments, a composition as described herein is formulated for topical administration. Dosage forms for OTC and pharmaceutical compositions suitable for topical administration are known in the art, and include solutions, emulsions, creams, lotions, gels, and sprays. For example, the composition as described herein may be formulated as a gel for topical administration.

[0122] In alternative embodiments, a composition as described herein is formulated for pulmonary or bronchial administration, such as by oral or nasal inhalation. Dosage forms for compositions suitable for pulmonary administration are known in the art, and include powder compositions and fine particle formulations (e.g., dusts or mists) which may be generated by and administered via metered dose pressurized aerosols, nebulizers, insufflators, or the like.

### Treatments

[0123] The bacteriophages and compositions described herein can be used in prophylactic and therapeutic treatment methods to reduce the risk of or prevent VRE colonization or infection or to treat VRE colonization or infection, or to modulate a subject's microbiome (such as by preventing or reducing colonization by VRE), or for reducing or eliminating VRE gut colonization, or for treating VRE-related diseases or conditions, or for similar effects.

[0124] In accordance with such uses, the bacteriophages and compositions described herein can be administered according to any effective dosing regimen, which may vary based on the prophylactic or therapeutic effect to be achieved (e.g., prevention of infection vs. treatment of colonization or treatment of bacteremia), the specific bacteriophage(s) used, the route of administration and dosage form, and patient characteristics such as one or more of the age and weight of the patient, the patient's condition, and the type and severity of the VRE infection. Exemplary dosages are described below for illustrative purposes only.

[0125] A typical bacteriophage dose for a human patient is likely to contain from 10³ to 10¹² plaque forming units (PFU) of the one or more bacteriophage(s), including from 10⁴ to 10¹¹, such as 10⁶ to 10¹⁰, which may be administered one or more times per day, such as one, two, three, four, or five times per day. The dose may be provided in a single discrete dosage form (e.g., one tablet or capsule) or multiple discrete dosage forms (e.g., two, three, four, or more tablets or capsules), or in a suitable volume of a bulk dosage form (e.g., 1 mL of a liquid composition). The treatment may continue for one or more days, including one day, one week, two weeks, three weeks, one month, or longer.

[0126] One example of a suitable dose regimen is 1-3 capsules or tablets, each containing 10⁸-10¹⁰ PFUs bacteriophage(s), orally administered 1-3 times a day for 1-4 weeks. Another example of a suitable dose regimen is 1 mL of a liquid composition containing 10⁸-10¹¹ PFUs bacteriophage(s), orally administered 1-3 times a day for 1-4 weeks.

[0127] As noted above, the bacteriophage compositions and methods described herein may be used in conjunction with an agent that reduces stomach acids. For example, a subject undergoing treatment may also be treated with a proton pump inhibitor (e.g., omeprazole), and/or may also consume a gastric acid neutralizer, such as bicarbonate (e.g., sodium bicarbonate) shortly before taking a dose of the bacteriophage compositions.

[0128] The bacteriophages and compositions described herein may be used prophylactically or therapeutically to treat any subject in need thereof, including any subject at risk of VRE colonization or infection (including hospitalized subjects) or any subject colonized or infected with VRE.

[0129] The bacteriophages and compositions described herein advantageously may be used in subjects facing, being treated with, or recovering from one or more of an invasive medical procedure, chemotherapy, a solid organ transplant, or an immunosuppressive therapy, or other subjects who are immunosuppressed or immunocompromised. In such embodiments, the bacteriophages and compositions described herein may be administered one or more of prior to, during, and after the invasive medical procedure, chemotherapy, solid organ transplant, or immunosuppressive therapy. For example, a course of bacteriophage treatment as described herein may be commenced 1-4 weeks prior to the other treatment period (e.g., the invasive medical procedure, chemotherapy, solid organ transplant, or immunosuppressive therapy) and be continued during and, optionally after, the other treatment period.

### VRE Detection Methods

[0130] The bacteriophages described herein (or lytic enzymes thereof) also can be used in in vitro assays to detect target bacteria (e.g., VRE) in biological samples obtained from a subject, such as to diagnose whether a subject is infected with VRE and/or to assess the level of infection (colonization), including to assess the need for or efficacy of treatment as described herein. Without being bound by theory, it is believed the bacteriophages described herein (or their lytic enzymes) specifically lyse the targeted bacteria (e.g., VRE) without affecting other prokaryotic or eukaryotic cells that may be present, thus specifically inducing release of measurable products of the target bacteria, such as adenosine triphosphate (ATP) and/or protein kinase (AKT) specific to the target VRE. Thus, a detection assay can be conducted based on the detection of ATP or AKT of the target bacteria.

[0131] An illustrative example of such an assay is as follows. Samples of clinical material (e.g., fecal specimens) to be analyzed are obtained and suspended in an appropriate buffer. One or more bacteriophages (or lytic enzymes thereof) are added to the suspension, as a result of which any targeted bacterial cells present in the samples are lysed and their ATP is released. To detect the ATP (for example), a luciferin+luciferase preparation is added, and luminescence is measured, such as by using a luminometer. A quantitative assay may be developed by creating a calibration curve between the luminometer readings and the number of targeted bacteria cells lysed (in general, the average amount of ATP per bacterial cell is 0.5-1.0 fg). Absence of luminescence indicates absence of targeted bacteria cells in the sample analyzed.

### Vaccines and Bacterins

[0132] Also provided are vaccines and bacterins prepared using the bacteriophages (or lytic enzymes thereof) described herein. For example, the bacteriophages described herein (including variants of the deposited strains as discussed above) or lytic enzymes thereof can be used to lyse specific strains of targeted bacteria (e.g., targeted VRE), to obtain bacterial lysates containing immunological epitopes of the bacteria, which in turn can be used to prepare vaccines/bacterins against the targeted VRE. The final vaccine/bacterin preparations can be prepared by methods known in the art. When used to obtain the bacterins, the phages may be removed to obtain the final vaccine/bacterin preparation. Alternatively, the phages may be retained in the final preparation, in a viable, active state. In such embodiments, the phages as present in the vaccine/bacterin formulation may remain active against the targeted bacteria (e.g., targeted VRE), providing another mechanism of action of efficacy of the preparation, e.g., they may lyse target bacteria (VRE) present in the vaccinated subject. For example, the final vaccine/bacterin preparation may be prepared to have phage(s) present at levels ranging from 10³-10¹² PFU/ml. For example, the final vaccine/bacterin preparation may be prepared to have phage(s) present at levels ranging from 10⁶-10¹⁰ PFU/ml.

[0133] In specific embodiments, a vaccine/bacterin preparation is prepared against prevalent, problematic strains of the targeted bacteria to obtain vaccine/bacterin preparations containing immunological epitopes that are most relevant for protecting a target patient population against infection. In further specific embodiments, the bacteriophage is retained unaltered in the final vaccine/bacterin preparation as discussed above.

[0134] Bacteriophage-based vaccines and bacterins also may be prepared by using recombinant constructs expressing relevant genes of the bacteriophage (e.g., genes associated with lytic activity, such as those encoding lytic enzymes) or isolated or recombinantly produced lytic enzymes, which can be used in place of phages per se in a protocol as outlined above. An example of this general methodology is outlined in Panthel et al., Infect Immun.71(1): 109-16 (2003).

[0135] In accordance with any of these embodiments, also provided are uses of vaccines comprising bacterins as described above to immunize a subject in need thereof, such as a subject suffering from or at risk of infection by VRE. Suitable vaccination protocols can be developed by those skilled in the art based on the guidance provided herein.

### Kits

[0136] Also provided are kits for practicing the various embodiments described herein.

[0137] A kit for prophylactic or therapeutic uses of the bacteriophage(s) described herein may comprise a composition as described herein together with instructions for the prophylactic or therapeutic use of the composition as herein described, optionally together with packaging material.

[0138] A kit for prophylactic or therapeutic uses of the vaccine(s)/bacterin(s) described herein may comprise a vaccine/bacterin as described herein together with instructions for the prophylactic or therapeutic use of the vaccine/bacterin as herein described, optionally together with packaging material.

[0139] A kit for a VRE detection assay may comprise one or more bacteriophages as described herein (or one or more lytic enzymes thereof) together with instructions for the use of the bacteriophage(s) (or enzyme(s)) in a VRE detection assay as herein described, optionally together with packaging material.

### EXAMPLES

[0140] The invention is further described in the following examples, which are not in any way intended to limit the scope of the invention.

### Example 1: VRE Isolates

### Obtaining VRE Isolates

[0141] VRE were isolated from patients in the surgical intensive care and intermediate care units of the University of Maryland VA Medical Center in Baltimore. Maryland. Trypticase Soy Agar supplemented with 5% sheep blood (BBL, Cockeysville Md.) was used to isolate enterococci from urine, wounds and sterile body fluids. VRE were isolated from stool specimens on Colistin Nalidixic Acid (CNA) agar (Difco labs, Detroit, Mich.) supplemented with defibrinated sheep blood (5%), vancomycin (10 μg/ml) and amphotericin (1 μg/ml). See Facklam, et al., Enterococcus. In Manual of Clinical Microbiology (6th ed. 1995) (Am. Soc. Microbiol., Washington, D.C.), pp. 308-312.

### Identification of VRE

[0142] Enterococci were identified by esculin hydrolysis and growth in 6.5% NaCl at 45° C. Identification to the species level was performed in accordance with Facklam and Collins, J. Clin. Microbiol., 27:731-34 (1989).

### Antimicrobial Susceptibility Testing of VRE

[0143] Antimicrobial susceptibilities to ampicillin, vancomycin, streptomycin, and gentamicin were determined using the E test quantitative minimum inhibitory concentration procedure (AB Biodisk, Solna Sweden). Quality control strains of E. faecium (ATCC 29212, ATCC 51299) were used to ensure potency of each antimicrobial agent tested. With the exception of vancomycin, susceptibility interpretations from the National Committee for Clinical Laboratory Standards were adhered to. See National Committee for Clinical Laboratory Procedures, “Methods for Dilution Antimicrobial Susceptibility Tests for Bacteria that Grow Aerobically.” (3rd ed., 1993) (Nat. Committee for Clin. Lab. Standards, Villanova Pa.); National Committee for Clinical Laboratory Standards, “Performance Standards for Antimicrobial Disk Susceptibility Tests.” (5th ed., 1993) (Nat. Committee for Clin. Lab. Standards, Villanova Pa.). A VRE isolate was defined as one having a minimum inhibitory concentration to vancomycin of at least 16 μg/ml.

### Defining Generically Distinct VRE Strains

[0144] Distinct VRE isolates were characterized as such by contour-clamped homogeneous electric field electrophoresis after digestion of chromosomal DNA with Smal. See, Verma, P. et al., “Epidemiologic characterization of vancomycin resistant enterococci recovered from a University Hospital” In Abstracts of the 94th General Meeting of the American Society for Microbiology, Las Vegas Nev. (1994); Dean, et al., “Vancomycin resistant enterococci (VRE) of the vanB genotype demonstrating glycoprotein (G) resistance inducible by vancomycin (V) or teicoplanin (T)” In Abstracts of the 94th General Meeting of the American Society for Microbiology, Las Vegas Nev. (1994). For VRE strains which differed only by 1-3 bands after initial analysis, electrophoretic studies were also performed using Apal digestion. See Donabedian, J. Clin. Microbiol., 30; 2757-61 (1992). The vancomycin-resistant genotype (vanA, vanB or vanC) was defined by polymerase chain reaction analysis using specific primers selected from published gene sequences. See Goering, R. V. and the Molecular Epidemiological Study Group “Guidelines for evaluating pulsed field restriction fragment patterns in the epidemiological analysis of nosocomial infections.” Abstract of the Third International Meeting of Bacterial Epidemiological Markers; Cambridge England (1994).

[0145] Using these methodologies, 214 distinct VRE strains were identified from the strains isolated at the VA Medical Center.

### Example 2: Bacteriophages

### Isolation of VRE Phages

[0146] 500 ml water from the Chesapeake Bay (a potential source of phages) was mixed with 100 ml of 10 times concentrated LB broth (Difco Laboratories) (comprising 10 g/L tryptone, 5 g/L yeast extract, 10 g/L NaCl). This water-broth mixture was inoculated with 1 ml of an 18-24-hour LB broth culture of a VRE strain and incubated at 37° C. for 24 hours to enrich the mixture any bacteriophage present which can infect the added VRE strain. After incubation, the mixture was centrifuged at 5,000 g for 15 minutes to eliminate matter which may interfere with subsequent filtration. The supernatant was filtered through a 0.45 μm Millipore filter. The filtrate was assayed by the Streak Plate Method and Appelman Tube Turbidity Test to assess lytic activity against different VRE strains, generally using the methodology outlined below.

### Plaque Assay:

[0147] A plaque assay can be used to assess whether a given VRE strain is susceptible to infection by a given bacteriophage preparation. Plaque picking can be used to obtain a preparation of a single strain of bacteriophage.

[0148] An 18-24-hour nutrient broth culture of the VRE strain (0.1 ml) to be tested and dilutions of a VRE bacteriophage preparation (1.0 ml) are mixed and then added to 4.5 ml 0.7% molten agar in nutrient broth at 45° C. This mixture is completely poured into a petri dish containing 25 ml of nutrient broth solidified with 2% agar, and incubated overnight at 37° C. During overnight incubation at 37° C., VRE grow in the agar and form a confluent lawn with some VRE cells being infected with bacteriophage. The phages replicate and lyse the initially infected cells and subsequently infect and lyse neighboring bacteria. The agar limits the physical spread of the phages throughout the plate, resulting in small, visibly clear areas on the plate called plaques, where bacteriophage has destroyed VRE within the confluent lawn of VRE growth.

[0149] The number of plaques formed from a given volume of a given dilution of bacteriophage preparation is a reflection of the titer of the bacteriophage preparation. One plaque with a distinct morphology represents one phage particle that replicated in VRE in that area of the bacterial lawn. Thus, a pure bacteriophage preparation can be obtained by removing the material in that plaque with a pipette, such as a Pasteur pipette (referred to as a “plaque pick”) and using this material as the inoculum for further growth cycles of that phage. By conducting further plaque assays on preparations of phage grown from the same plaque pick, all plaques will have a single appearance (plaque morphology) which is the same as the plaque picked, which is a further indication of purity. Therefore, plaque assay techniques can be used to assess bacteriophage potency against the VRE, and also to assess bacteriophage purity of the bacteriophage preparation.

### Streak Plate Method:

[0150] The streak plate method can be used to screen one or more phages against one or more VRE strains.

[0151] Eighteen-hour LB broth cultures of one or more enterococci strains to be tested are grown at 37° C. (resulting in approximately 10⁹ CPU/ml) and a loopful of each culture is streaked across a nutrient agar plate in a single line. This results in each plate having a number of different VRE strains streaked across it in single straight lines of growth.

[0152] Single drops of bacteriophage filtrates to be tested are applied to each VRE streak, and the plate is incubated for 6 hours at 37° C., at which time the streaks of the different VRE strains are examined for the ability of the phage to form clear areas devoid of bacterial growth, indicating lysis of that particular VRE strain by that particular phage. The VRE host range for a given phage filtrate can be ascertained by determining on which VRE streaks it caused a clear area devoid of growth and on which VRE streaks it did not.

### Appelman Tube Turbidity Test

[0153] The Appleman Tube Turbidity test (see Adams, Bacteriophages. (Interscience Publ. New York N.Y.) (1959)) can be used to screen a phage preparation against one or more VRE strains.

[0154] 18-hour LB broth cultures of one or more VRE strains are prepared, and 0.1 ml of phage filtrate or a dilution thereof is added to 4.5 ml of VRE broth cultures and incubated at 37° C. for 4 hours (monophage preparation containing a single phage), or for 4-18 hours (polyvalent preparation containing at least two phages). Phage-free VRE broth cultures are used as controls. Broth cultures which are normally turbid due to bacterial growth are examined for the ability of the phage preparation to lyse the VRE strain as indicated by clearing of culture turbidity. The host range of a given phage preparation can be ascertained by which VRE broth cultures the phage preparation clears and which broth cultures it does not.

[0155] The bacteriophages described herein were isolated and identified using these methodologies.

### Example 3: Characterization of Phages

### Restriction Fragment Length Polymorphism (RFLP) Profile

[0156] RFLP profiles of the bacteriophages described herein are shown in FIG. 1. DNA was isolated from the bacteriophage using Qiagen Plasmid Miniprep or Midiprep kits (Valencia, CA) according to the manufacturer's directions. The DNA was quantitated by measuring absorbance at 260 nm. Approximately 0.5-1 μg of DNA was digested with an appropriate restriction enzyme (Hind III-digest), and RFLP profile was determined on 1% agarose gel after staining with ethidium bromide.

### Genome Analysis and Average Nucleotide Identity of the VRE Phages

[0157] Full genome sequencing and sequence analysis can be used to identify the bacteriophages described herein or their progeny. Progeny that have an average nucleotide identity (ANI)≥95% are considered to be of the “Same Species” as defined by Olm (Olm M., “Are these microbes the ‘same’?” microBEnet (2; 2017) (available at microbe.net/2017/02/15/are-these-microbes-the-same/) and Jain et al. (Jain et al. Nature Comm. 9(1):5114 (2018). A phage having a gANI≥95% to a reference phage is deemed to be “substantially equivalent” to the reference bacteriophage.

[0158] The VRE bacteriophages were sequenced on MiSeq with read length 2×250 bp. Reads were trimmed for illumina adapter, length (≥50 bp), quality (q≥20) and mapped to Enterococci reference sequences available in GenBank. The unmapped reads were collected and assembled using Unicycler assembler. The strain delineation was assessed by calculating average nucleotide identity over genome (gANI). See, e.g., Jain et al., supra; Varghese et al., Nucleic Acids Res. 43(14):6761-71 (2015).

### Example 4: Production of Phage Preparations

[0159] The VRE bacteriophages described herein can be propagated as illustrated herein.

[0160] Strains of the target bacteria (e.g., VRE) or other closely related bacterial species on which the bacteriophage can propagate are cultured in batch culture using a suitable growth medium (e.g., BHI broth), and inoculated with the bacteriophage at a pre-determined multiplicity of infection (MOI). Following incubation and bacterial lysis, the bacteriophage is harvested and purified and/or concentrated to yield phage progeny suitable for the uses described herein.

[0161] Suitable purification and concentration procedures include one or more of filtration, centrifugation (including continuous-flow centrifugation), size-exclusion chromatography, ion exchange chromatography, and other known bacteriophage purification and concentration techniques. See, e.g., Adams MH. Bacteriophages. 443-519 (Interscience Publishers, Ltd, London) (1959). The purity of the phage preparation can be assessed by one or more of electron microscopy, SDS-PAGE, DNA restriction digest, and analytical ultracentrifugation.

[0162] The bacteriophage concentration of a preparation can be adjusted using phage titration protocols. For example, the bacteriophage concentration of a preparation is determined. If a more concentrated phage preparation is desired, concentration is increased by one or more of filtration, centrifugation, or other means. If a less concentrated phage preparation is desired, the concentration is reduced by dilution with water or other pharmaceutically acceptable diluent (such as a pharmaceutically acceptable buffer). Typical pharmaceutical or OTC compositions include a phage titer of 10⁶ to 10¹² PFU/mL, such as a phage titer of 10⁹ to 10¹¹ PFU/mL.

[0163] Bacteriophage preparations may be stored at 2-8° C. Alternatively, phage preparations can be freeze-dried or spray-dried for storage, or can be encapsulated and stabilized by approaches known in the art, such as with one or more of a protein, lipid, and polysaccharide. Upon reconstitution, the phage titer can be verified using phage titration protocols, host bacteria assays, or other widely known bacteriophage assay techniques. See, e.g., Adams, supra.

### Example 5: Phage Activity

[0164] Bacteriophages of the bacteriophage strains described herein effectively lyse VRE strains, demonstrating their efficacy against VRE strains.

[0165] The VRE phages described herein can be used alone or in various combinations in order to target specific VRE strains or strain subgroups. For example, the following phages of the following five strains can be combined in one cocktail to effectively target all of the 214 VRE strains isolated at the VA Medical Center, as well as five reference Enterococci isolates: E401 (ATCC 51299), E403 (ATCC 19433), E618 (ATCC 700221), E400 (ATCC 29212) and E402 (ATCC 11823):
[0166] VREML237-2 (SEQ ID NO: 1) (deposited at the ATCC under Accession Number PTA-126934)
[0167] VREML110-1 (SEQ ID NO: 2) (deposited at the ATCC under Accession Number PTA-126932)
[0168] VREML 105 (SEQ ID NO: 3) (deposited at the ATCC under Accession Number PTA-126931)
[0169] VREML202-1 (SEQ ID NO: 4) (deposited at the ATCC under Accession Number PTA-126933)
[0170] VREML85-2 (SEQ ID NO: 5) (deposited at the ATCC under Accession Number PTA-126930).

[0171] As set forth in tables below, this five-phage cocktail lyses 94% of the 214 VRE strains isolated at the VA Medical Center plus the five reference strains.

TABLE 1
Activity of five VRE phages against 214 VRE strains

| | | | | | | Kill Rate If Added |
|---|---|---|---|---|---|---|
| | | | Resis- | Un- | | To Cocktail |
| Rank | Phage | Kills | tant | tested | Unique | (cumulative) |
| 1 | VREML- | 186 | 26 | 2 | 186 | 186 (86.92%)1 |
| | 237-2 | | | | | (VREML 237-2 |
| | | | | | | only) |
| 2 | VREML- | 158 | 54 | 2 | 7 | 193 (90.19%) |
| | 85-2 | | | | | (+VREML-85-2) |
| 3 | VREML- | 169 | 43 | 2 | 4 | 197 (92.06%) |
| | 110-1 | | | | | (+VREML-110-1) |
| 4 | VREML- | 68 | 144 | 2 | 2 | 199 (92.99%) |
| | 202-1 | | | | | (+VREML-202-1) |
| 5 | VREML- | 146 | 66 | 2 | 1 | 200 (93.46%) |
| | 105 | | | | | (+VREML-105; |
| | | | | | | all 5 present) |

TABLE 2
Activity of five VRE phages against
five ATCC Enterococci strains

| | | Number of | |
|---|---|---|---|
| Strain, | Strain, | Effective | |
| ITX ID | ATCC ID | Phages | Phage names |
| E401 | ATCC 51299 | 5 | VREML-85-2, VREML-202-1, |
| | | | VREML-237-2, VREML-105, |
| | | | VREML-110-1 |
| E403 | ATCC 19433 | 4 | VREML-85-2, VREML-202-1, |
| | | | VREML-237-2, VREML-110-1 |
| E618 | ATCC 700221 | 4 | VREML-85-2, VREML-237-2, |
| | | | VREML-105, VREML-110-1 |
| E400 | ATCC 29212 | 3 | VREML-85-2, VREML-202-1, |
| | | | VREML-237-2 |
| E402 | ATCC 11823 | 3 | VREML-85-2, VREML-237-2, |
| | | | VREML-110-1 |

[0172] The PhageSelector™ software used for this analysis is described in Cieplak, et al., Gut Microbes 9(5): 01-19 (2018).

### Example 6: Efficacy in In Vivo Mouse Model

[0173] Efficacy of the described bacteriophages was demonstrated in an in vivo mouse model as described herein.

[0174] Establishment of sustained VRE colonization in an animal model was carried out as follows:

[0175] ICR outbred mice (6 weeks old) were decolonized for three days with 1 mg/ml of gentamicin in drinking water plus subcutaneous injections of clindamycin (2.4 mg/day/mouse) to reduce their normal intestinal flora. Twenty-four hours prior to administration of VRE, antibiotics were stopped to allow for wash out. VRE (about 2×10³ CFU) diluted in saline was administered once by oral gavage to each mouse. Starting one hour after VRE administration, animals were treated with 0.2 mL of the five-phage cocktail described herein at about 1×10⁹ PFU/dose (n=10) or PBS (n=5) by oral gavage every 8 hours over 7 days for a total of 21 doses. Fresh stool pellets (1/mouse) were collected daily to quantitate fecal bacteria levels. The fecal pellets were placed in sterile pre-weighed Eppendorf tubes, weighed, serially diluted in 0.9% saline and plated on Enterococcosel™ Agar (EA), a selective medium for enterococci, with 8 μg/mL of nitrofurantoin (NIT8) (EA NIT8) and erythromycin 32 μg/mL Colony forming units (CFUs) were counted after incubation at 37° C. for 48 hours and used to calculate the log 10 CFU/g feces.

[0176] The efficacy of phage treatment to reduce VRE gastrointestinal colonization was determined by quantitating VRE daily in weighed fecal samples from mice in the phage cocktail-treated group compared to the PBS-treated control group. Administration of the phage cocktail reduced the overall load of VRE gastrointestinal colonization compared to the PBS control group by about 0.5 log after phage administration, with the largest reduction in fecal VRE burden achieved by day 6. VRE colonization trended lower in the phage cocktail-treated group than the PBS controls at all time points tested.

### Example 7: Efficacy in In Vitro Human Gut Simulator Model

[0177] Efficacy of the described bacteriophages was demonstrated in an in vitro human gut simulator model as described herein. In particular, a five-phage cocktail of bacteriophages VREML237-2, VREML110-1, VREML105, VREML202-1, and VREML85-2 was shown to be effective against VRE in the SHIME® model (Simulator of the Human Intestinal Microbial Ecosystem or SHIME®), as outlined below. See Moye et al, J. Food Prot. 82(8): 1336-1349 (2019).

[0178] Healthy, VRE-negative human donor stool from 3 subjects was used in the SHIME® model, which simulates the ascending, transverse and descending colon using inoculum preparation, retention time, pH, temperature settings and reactor feed composition. The SHIME® setup was adapted to include 12 proximal colon compartments, to test the impact of inter-individual variability of 3 donors. SHIME® systems using healthy donor stool from 3 VRE-negative healthy individuals were stabilized for 2 weeks under healthy or dysbiotic (i.e., treated with 33.9 ppm clindamycin for 7 days (days −8 to −2)) conditions. Ascending colonic reactors were treated with either PBS or the phage cocktail (6×10¹⁰ PFU) twice a day, 8 hours apart, for 5 days starting on day-1. Four hours after the third and fifth dose of PBS or phage cocktail, the reactors were challenged with VRE (1×10⁹ CFU) at 0 hours (day 0) and 24 hours (day 1).

[0179] Efficacy of the phage cocktail under both healthy and dysbiosed (i.e., following antibiotic treatment) conditions was compared to PBS treatment. Efficacy was calculated by quantitation of the VRE burden (CFU) over time (1 hour after each PBS or phage cocktail treatment, and at the time of each VRE challenge) in the proximal colon. The phage cocktail was effective in reducing the VRE burden to levels of reduction >50% compared to controls (PBS or clindamycin). In 3 out of 3 healthy stools, the phage cocktail accelerated E. faecium clearance and reduced E. faecium abundance by >83-99% within 21 hours after challenge compared to placebo control. In 3 out of 3 dysbiotic stool (healthy donor stool treated with clindamycin), the phage cocktail accelerated E. faecium clearance and reduced E. faecium abundance by >51-99% within 21 hours after challenge compared to antibiotic-treated samples. Effects on overall endogenous Enterococcus abundance was limited, indicating specific antipathogenic targeting of E. faecium VRE by the phages in the phage cocktail. In all samples, phage treatment did not impact short-chain fatty acid levels, and/or it improved levels of beneficial biomarkers compared to dysbiotic (antibiotic-treated) samples. Additionally, the phage cocktail did not alter the endogenous microbial composition in healthy donors and in 2 out of 3 donors the cocktail stimulated the microbial recovery of primary substrate degraders following antibiotic treatment.

### Example 8: Phase 1/2A Clinical Trial

[0180] Phase 1: This double-blinded, placebo-controlled, randomized Phase 1 trial will assess safety in about 10-20 healthy adults of a single dose of a VRE phage cocktail as described herein (i.e., a composition containing bacteriophages of two or more of the VRE bacteriophage strains described herein, such as two or more or all of VREML237-2, VREML110-1, VREML105, VREML202-1, and VREML85-2) administered orally 2 or 3 times per day over a 7-day period, with up to 3 months of follow up compared to a placebo control group. For example, about 1×10¹⁰ PFU phages may be administered orally two or three times a day, at least one hour before a meal. Clinical safety assessments will include observation of clinical signs and symptoms, analysis of blood parameters, and measuring fecal calprotectin content. The primary objective is to determine the safety of oral administration of a course of the bacteriophage cocktail. The exploratory objectives include determining the impact of the phage cocktail on the human fecal microbiome using state-of-the-art next generation sequencing and bioinformatic techniques, and evaluating phage shedding.
[0181] Phase 2a: This double-blinded, placebo-controlled, randomized Phase 2a trial will assess the safety and efficacy of a VRE phage cocktail as described herein (i.e., a composition containing bacteriophages of two or more of the VRE bacteriophage strains described herein, such as two or more or all of VREML237-2, VREML110-1, VREML105, VREML202-1, and VREML85-2) administered orally 2 or 3 times per day over a 2-week period, compared to a placebo control group in about 30-50 VRE-colonized adult subjects, with up to 6 months of outpatient follow up. For example, about 1×10¹⁰ PFU phages may be administered orally two or three times a day, at least one hour before a meal. Clinical safety assessments will be as described for Phase 1 above. Efficacy will be determined by quantitative assessment of VRE fecal shedding. The primary objectives are safety and efficacy as assessed by the impact of phage administration on the levels of VRE in the GI tract vs. placebo. The exploratory objectives include evaluating phage shedding and determining the impact of the phage cocktail on the human gut microbiome.

1. An isolated bacteriophage that infects and lyses one or more strains of vancomycin-resistant Enterococci (VRE), wherein the bacteriophage is of a strain selected from:
(i) bacteriophage strain VREML237-2 (SEQ ID NO: 1) deposited with the ATCC under Accession Number PTA-126934, or a variant strain thereof, wherein the variant strain has an average nucleotide identity across its genome (gANI) of at least 80% to said bacteriophage strain VREML237-2;
(ii) bacteriophage strain VREML110-1 (SEQ ID NO: 2) deposited with the ATCC under Accession Number PTA-126932, or a variant strain thereof, wherein the variant strain has a gANI of at least 80% to said bacteriophage strain VREML110-1;
(iii) bacteriophage strain VREML105 (SEQ ID NO: 3) deposited with the ATCC under Accession Number PTA-126931, or a variant strain thereof, wherein the variant strain has a gANI of at least 80% to said bacteriophage strain VREML105;
(iv) bacteriophage strain VREML202-1 (SEQ ID NO: 4) deposited with the ATCC under Accession Number PTA-126933, or a variant strain thereof, wherein the variant strain has a gANI of at least 80% to said bacteriophage strain VREML202-1;
(v) bacteriophage strain VREML85-2 (SEQ ID NO: 5) deposited with the ATCC under Accession Number PTA-126930, or a variant strain thereof, wherein the variant strain has a gANI of at least 80% to said bacteriophage strain VREML85-2;
(vi) bacteriophage strain VREML110-2 (SEQ ID NO: 6) deposited with the ATCC under Accession Number PTA-127012 or a variant strain thereof, wherein the variant strain has a gANI of at least 80% to said bacteriophage strain VREML110-2;
(vii) bacteriophage strain VREML237-1 (SEQ ID NO: 7) deposited with the ATCC under Accession Number PTA-127016 or a variant strain thereof, wherein the variant strain has a gANI of at least 80% to said bacteriophage strain VREML237-1;
(viii) bacteriophage strain VREML85-1 (SEQ ID NO: 8) deposited with the ATCC under Accession Number PTA-127011 or a variant strain thereof, wherein the variant strain has a gANI of at least 80% to said bacteriophage strain VREML85-1;
(ix) bacteriophage strain VREML137-2 (SEQ ID NO: 9) deposited with the ATCC under Accession Number PTA-127013 or a variant strain thereof, wherein the variant strain has a gANI of at least 80% to said bacteriophage strain VREML137-2;
(x) bacteriophage strain VREML202-2 (SEQ ID NO: 10) deposited with the ATCC under Accession Number PTA-127015 or a variant strain thereof, wherein the variant strain has a gANI of at least 80% to said bacteriophage strain VREML202-2; and
(xi) bacteriophage strain VREML139 (SEQ ID NO: 11) deposited with the ATCC under Accession Number PTA-127014 or a variant strain thereof, wherein the variant strain has a gANI of at least 80% to said bacteriophage strain VREML139.

2. An isolated bacteriophage of claim 1, wherein the bacteriophage is a variant strain of one of said deposited bacteriophage strains that has a gANI of at least 90% to the deposited bacteriophage strain.

3. An isolated bacteriophage of claim 1, wherein the bacteriophage is a variant strain of one of said deposited bacteriophage strains that has a gANI of at least 95% to the deposited bacteriophage strain.

4. An isolated bacteriophage of claim 1, wherein the bacteriophage is a variant strain of one of said deposited bacteriophage strains that has an RFLP DNA profile substantially equivalent to the RLFP DNA profile of the deposited bacteriophage strain.

5. An isolated progeny bacteriophage of a deposited bacteriophage strain of claim 1, wherein the isolated progeny bacteriophage has a gANI of ≥80% relative to the deposited bacteriophage strain.

6. An isolated progeny bacteriophage of a deposited bacteriophage strain of claim 1, wherein the isolated progeny bacteriophage has a gANI of ≥95% relative to the deposited bacteriophage strain.

7. An isolated progeny bacteriophage of a deposited bacteriophage strain of claim 1, wherein the isolated progeny bacteriophage has a gANI of ≥98% or ≥99.9% relative to the deposited bacteriophage strain.

8. A composition comprising:
(i) bacteriophages of one or more strains of any one of claims 1 to 7; and
(ii) a pharmaceutically acceptable carrier.

9. A composition according to claim 8, wherein the one or more bacteriophage strains comprise or consist of:
(i) bacteriophage strain VREML237-2 deposited with the ATCC under Accession Number PTA-126934, or a variant strain thereof, wherein the variant strain has a gANI of at least 80% to said bacteriophage strain VREML237-2;
(ii) bacteriophage strain VREML110-1 deposited with the ATCC under Accession Number PTA-126932, or a variant strain thereof, wherein the variant strain has a gANI of at least 80% to said bacteriophage strain VREML110-1;
(iii) bacteriophage strain VREML 105 deposited with the ATCC under Accession Number PTA-126931, or a variant strain thereof, wherein the variant strain has a gANI of at least 80% to said bacteriophage strain VREML105;
(iv) bacteriophage strain VREML202-1 deposited with the ATCC under Accession Number PTA-126933, or a variant strain thereof, wherein the variant strain has a gANI of at least 80% to said bacteriophage strain VREML202-1; and
(v) bacteriophage strain VREML85-2 deposited with the ATCC under Accession Number PTA-126930, or a variant strain thereof, wherein the variant has a gANI of at least 80% to said bacteriophage strain VREML85-2.

10. A composition according to claim 8, wherein the one or more bacteriophage strains comprise or consist of (i) bacteriophage strain VREML237-2; (ii) bacteriophage strain VREML110-1; (iii) bacteriophage strain VREML105; (iv) bacteriophage strain VREML202-1; and (v) bacteriophage strain VREML85-2.

11. A composition according to any one of claims 8-10, wherein the composition is provided in an oral dosage form, optionally provided with an enteric coating, optionally in a form selected from tablets, hard gel capsules, soft gel capsules, dragees, powders, granules, solutions, suspensions, dispersions, syrups, and microgels.

12. A composition according to any one of claims 8-10, wherein the composition is provided in dosage form selected from:
a rectal dosage form, optionally in a suppository, enema, rectal foam, lotion, or gel;
a vaginal dosage form, optionally in a suppository, cream vaginal foam, lotion, or gel;
a pulmonary dosage form, optionally in a powder, aerosol, nebulizer, or insufflator composition;
a topical dosage form, optionally in an emulsion, cream, lotion, gel, or spray, and an injectable dosage form.

13. A composition according to any one of claims 8-12, wherein the composition further comprises a probiotic.

14. A composition according to claim 13, wherein the probiotic comprises a probiotic bacteria.

15. A composition according to claim 14, wherein the probiotic bacteria is one or more selected from the group consisting of L. acidophilus, L. rhamnosus, L. gasseri, L. reuteri, L. bulgaricus, L. plantarum, L. johnsonii, L. paracasei, L. casei, L. salivarius, L. lactis, B. bifidum, B. longum, B. breve, B. infantis, B. lactis, B. adolescentis, Streptococcus thermophilus, Bacillus cerus, Bacillus subtilis, and any combinations thereof.

16. A composition according to any one of claims 13-15, wherein the probiotic comprises a probiotic yeast.

17. A composition according to claim 16, wherein the probiotic yeast is selected from the group consisting of Saccharomyces cerevisiae, Saccharomyces boulardii, Saccharomyces cerevisiae var. boulardii, Issatchenkia occidentalis, Lachancea thermotolerans, Metschnikowia ziziphicola, Torulaspora delbrueckii, and any combination thereof.

18. A method of reducing the risk of, or preventing, or treating VRE colonization or infection in a subject in need thereof, or for modulating a human subject's microbiome, comprising administering to the subject a bacteriophage according to any one of claims 1-7 or a composition according to of any one of claims 8-17.

19. A bacteriophage according to any one of claims 1-7 or a composition according to of any one of claims 8-17, for use in reducing the risk of, or preventing, or treating VRE colonization or infection in a subject in need thereof, or for modulating a human subject's microbiome.

20. Use of a bacteriophage according to any one of claims 1-7 or a composition according to of any one of claims 8-17, in the preparation of a medicament for reducing the risk of, or preventing, or treating VRE colonization or infection in a subject in need thereof, or for modulating a human subject's microbiome.

21. The method of claim 18, bacteriophage or composition for use of claim 19, or use of claim 20, wherein the subject is at risk of colonization or infection by VRE or is colonized or infected by VRE, optionally wherein the subject is an immunosuppressed or immunocompromised subject.

22. The method, bacteriophage or composition for use, or use of any one of claims 18-21, wherein the subject suffers from VRE gut colonization and the method is effective to reduce or eliminate VRE gut colonization.

23. The method, bacteriophage or composition for use, or use of any one of claims 18-22, wherein the treatment further comprises administering a probiotic to the subject, optionally wherein the probiotic is provided in the same composition as the bacteriophage.

24. The method, bacteriophage or composition for use, or use of any one of claims 18-23, wherein the bacteriophage or composition or medicament is administered orally.

25. The method, bacteriophage or composition for use, or use of any one of claims 18-23, wherein the bacteriophage, composition, or medicament is administered rectally.

26. The method, bacteriophage or composition for use, or use of any one of claims 18-23, wherein the bacteriophage, composition, or medicament is administered topically.

27. The method, bacteriophage or composition for use, or use of any one of claims 18-23, wherein the bacteriophage, composition, or medicament is administered vaginally.

28. A composition comprising a lytic enzyme produced by a bacteriophage according to any one of claims 1-7.

29. A composition comprising a derivative product of bacteriophage according to any one of claims 1-7, wherein the derivative product has activity against VRE or encodes a product that has activity against VRE, optionally wherein the derivative product is one or more selected from DNA, cDNA, mRNA and synthetic polynucleotide sequences, DNA/RNA hybrids, and anti-sigma factor genes and expression products thereof.

30. A vaccine comprising a VRE bacterial lysate obtained by lysing a VRE strain with a bacteriophage of any one of claims 1-7 or a lytic enzyme thereof.

31. A method for vaccinating a subject against VRE infection, comprising administering to the subject a vaccine of claim 30.

32. A VRE bacterial lysate obtained by lysing a VRE strain with a bacteriophage of any one of claims 1-7 or a lytic enzyme thereof, for use in vaccinating a subject against VRE infection.

33. Use of a VRE bacterial lysate in the preparation of a medicament for vaccinating a subject against VRE infection, wherein the bacterial lysate is obtained by lysing a VRE strain with a bacteriophage of any one of claims 1-7 or a lytic enzyme thereof.

34. A method for detecting VRE in a sample, comprising treating the sample with a bacteriophage of any one of claims 1-7 or a lytic enzyme thereof, thereby specifically inducing release of a measurable VRE bacterial product, and measuring the released VRE bacterial product.

35. The method of claim 34, wherein the released VRE bacterial product is one or more of adenosine triphosphate (ATP) and protein kinase (AKT).

36. The method of any one of claims 34-35, wherein the sample is a fecal sample obtained from a subject.

The application's sequence listing, which the Patent Office published only in electronic form, follows.

SEQUENCE LISTING (11 sequences)

SEQ ID NO: 1 - DNA, 147482 bp, Unknown
  Description of Unknown: VREML237-2 complete genome sequence
agttgcattgcaaaccttattcagtgaaaagggtggacgtgcattacaaggagaaaatggctctaaagtaatgagttctcttgacgaaggtattcgtaactcaatagatgacccaatgcttagtctagtctttggtaaaggtacaaaataccaaggaatggatggtagatttaaacttagagagcaactagataaaggtatctctgaccctgataacttaaaaacaatgatgaattatgcaaacgctcaacaaggtggaatggctactgatgatgctaagatggagtactttactttattagcagacaaaatgggagctagtttacgacctgatgaagttaaaggtatatttgagtctagtaatggatttaaggatttagacgatgacaccttagctaagatttctgaggaaaataaaggtctcggttcggataagtacggtcaaaatgcagaagactacaaaaactctaaagaaggtaccgctgacaggtcagaagcagtaacagagtaccaagcctctaagactaatgattatggtgatgtattacgtagcatcaacagtaatttaggtgggttacctactccgctatacttactgacaacagccgtaacagcattaactgccacattagcaatgagtggaggaatgtcaggtataagttctgtaattaaaggacttactaaaaccaagttcggttcttctgtagtaagtaaagcaggggatgtcctaggtaaaactaagctaggtaccaaggctatggaatacggtaagagcatatttacaggtgcaggtagtgcaacagctacagaagcaggtacaggactctttagtaaacttggcggattctttaaaggtggcgctgaaacagcaggtaaatcaggcggtatgtttggtaaacttggtggattgtttaaaggcggtgccgagtcaggaggtcttctaagtaaagcaggcgggttcttaggtaaagcagggggcgttttaggtaaggtagctccttggttagctgtagggtctgcggtagctgatattgccacatctgatgataaagtaaaagccacaggtaaaaatggtggtatgcttgcaggtatggcagggggttctgctctaggtacagcaattatgcccggaattggtactctaatcggtggtgtcggtggagcattcttaggttctaaagcaggtgaaggtcttgtaaatgcagggcgtggagctattgattggagcaaagaaaagctaggcggagttactgaagcaattaaagacgggttctcttggggtaaagacaagattactgacggtcttaaaggtgccttcaacatcggtaaagatgttatctctaagggaatggatataataactgctcctgataagatggttaaaaaaggtatctcctcaatgtggaattggggtaaagaaaaggttagtggattctttggtggggaaaccgctgaagcttctgagattcaacaaagcgggcttagtgcaggtaaggataaagcttctaacaagaagtctgaaaacaaagctaagaacgaagaagaaaaagacactaacaataaaaaatatcaatctgagaaagttagagagaaaaacatcatagatgaaaatgctaacttatcattctattctactttactagatagagcaaaacaaatactagtagaggctaaagcacaaaatggaatattcggtaattctaatggaggaagcgggggcgatagctcaggtggtacttcaggtagtggttccctagattacttaggtgatggtaagaaatggacaaatgaggacattactaaacatgacttaggtaaaacagttatgggacttactgctaaagaactagacgaatggattgactctgtagcacctgaaggttctgctatgcgtggtatgggagccgacttcttagaagcaggaaaacaatcaggtcttgacccaagatacttgattgctcactcagccgttgagactggatggggaacttctgcactatctaagaatggtgacaaaaatgcagggaactggttcggtattggtgcttttgacaatgaccctaataacggattcaaatacggagacggtttgacgggtggagccaaatggattgcagacaacttctattcagcaggacaaaccacattagaaaccatgagacataatggtggacaacatgagtacgcaactgaccctgattgggataagaaaatagcaagtatcatgaaaggttctgaatcgtatacgaaaggtaaagcacaagctcaaacattcagcacagctaactcagtgaatgtcacggttaacgatgcgggaagtgcaagtggagctagacaagtaggtgctagagtagcaagtgctgtgacagaaggcttgaacagcgcaatagatttttactcgaaagagcttaagagagcctagggttatccctaagctcttttttaaataattaggaggttagaaatgcctgagagaaagtataataggtacgtagcataccctgagtttggtattaaattcataacagaaacaagtgaatataacattagatatgctacaagcaaagatgatgtgccttcagataaattaatgagtcagagtgttattagtatgacaactaaaaatgctatggaagatgactccgcagtgttctcttttgtactatcaggtgatgtatattgggatagaatattagcaccaaacgatgtggttattcttaagattatacctgacacaaaaaactcagcttccttcacctcagtaacaaatgacactgttttggttggtcttgttaacgaggttcgtttagaggctgactatggagaaaactctaagatgtacagaatatcaggacaatcatttgctaagatattgattgattttgagattggggttattcaagaagtatctgttgtattatctgaggttggttggttgcctgatgactcgtctacagggcttcaattcagcacacgtaatgcttcagaaatagcttactctatgttatctaagtttttaaactatactcgttataagtttaaagacggtagaacaatagatgagttctttgaatatgacgggttagatagttggacagagtatgagagtttagccaaccccttaccctttataaactacgaaggtagtttgaaacaaatgttagatgatattgctgaaaagccatttaacgaagtgttctttgattttacgcaagatgaaacttgcaagctaattatgagacggactccttttgatgagagtgattggaataatttacctgcgcatgtaataacatcaaaagcagttatttcagaatcagtcgctaaaaatgacacggaagttgcatctatatttaatgttattgtagataacccattagggatggactctgtagattttgggtcattccctcgttattatcaagctttagttgacaaatacgggtattctaagctagaattaaagaataaatatttacaatcagtgttaaactcaactgacgattcagattcaagttctgatgcagatactacagataagcctgagggaagagaacttgaggtagaggcaactgcatacagttacaaacaggcaggtttaagtaacttgactgctacaggtattgatttacgagagcgcccaaaagtgctcgcagtagacccttcggttattcctttaggttccgatgtttgggtcgaaggtatgggtaactatattgcaggagatacaggtggggacatcaaaggtaacagaattgatattcacatgacttctgtagaggattgtttagcttttggacgaaagaaaatcaaagtagtcatcaaaaaggaaggctcttccaataacagtagaagtgctagtcccgcagtccaagctagaacagcaacagctagaactagtacaaactctagtgttaaatcaatgcactctgttatcttgtcttacttaaaagcacaacctgttaatactcttagagtgagaaagacagcagtagcttcaaaaatagtttctgtagattcaagaatagacactaacaaagctaacgctatcattgactcatatctaaagactagtagcttctctatagatgattttactagaattacaggaattaatgataagaatgtggatgatgcaggagacttaaaaataacctacagtaagcttaaaaagttccttaaagactacaaagataaaaccattcaggatagagaccttgttagagatgctatcatgaaagagtttaaaggtgttgacaaggataaagcgactacagtagcttcaactttcctagaagcagggggagagttaaagaaatctgagtacgagaagatattcactaataactcaacggatggagtacctaccgctcaagatgtcaatgcagaggcacttaaaatctttactgaaaagataacgaattggtattgtgagaacggaaacttctacgcaggggaaatcaaagttgtaggtcatccaaattaccgtatgggtaacagactaatctataatgatgagcaaaacaatgaaatatgggagtattacattgaaggagttcaacatgactacagctactcgtcagggtttgttacaactctatctgtaacacgaggacttcaagagggggggaattagtcgattctctaacctttggggcaaatcagaagagtttaaaggtggattgcttggagagccttctctagctgagttgtttgagcaaggtaaagcttctcaaaattcaggcggaagtagctcaggaagtagcagttcaggtaactatcctgcctctagttctaaacaggttgagaaagctatttcatggtttagagaacgtgagggtaaagttcattatagtatgggtgaaaatggaccccgaacgggaccaaattcatatgactgttcagccgccgttttctctgcattgatatatgcaggtatcctacctgaaggtacatggctaggtaacacggaatccttgtatcaattagaaggtagtttgttaatatctgtagataagaaagatgtgcaacgaggagacattttcgtagcaggggttaaaggagcttcattaaatgcagatggacatacaggaatgttcttagacagaaacaatattattcactgtagttcaagtgcaaatggtatcgcagagacacctgcacaaggttacatgggggatgcaagaggtttacctgtgtactactatagaataaaaggagttaagaaagatggctaatgtaggtttaggagcaaaaggtggcgctgtagctatgcaagcccttgaatacgcagacaaattcaccaaagataaaggtttcctatcagtatatagtcatggcaatcttaaagcaaagaaggctaaccctttcgagggtaaacctccttttgttttagatagcgcacagctaatctactggtgttataactatgcagggattgaaatgattggtggttcatctgaagttaacgttaaaaagataaggcatgacactagatttagagtaatatttactgaaggtcaaaagcacgtcagcattttcgataaactcttagcaggagatttaatctttttcggtacagatactgttcatgtaggtatttactatggagaaggagagtttattagtattaacggtacaggagattgggatgctagcaaaggtttagaacgtgcagacttaacaaatgggtactggtgggagtttttcaacggtgcagtactaagatgggagtaagtgtgctataattaatatatgagaagacaaatttaggaggaacataaatggcagagagagtatttcaatcaggactaggtacagaatgggaaagagcctataaagaaggtacaaaagtatcttctctgatattagcccaagtaataaaagtaaactatcaatataattctgtagaccttgttacgtcaggtaataaggacacatttcagagttcttacactgacgggggtaagttttctgccagacttcctcttgagtttggtggacgtaactctgtcggacaaccttacggacaagttaaacctgttaatgtaggggatactgtgcttgtaggttttgttaatgaaaacaaattagcacctgtagtattgagtgtatacggaaattctacagtcaatgaaatgctgtctagaactccgtttaaaaatgcagattatcaagatgatactctagttagacaaacaaatcaaaaatttagtctatacccttcattaacgtatgagaatgtggatggagaaggtaaccgaactgtaacctttacaggtaaatcattcttaatgttcaattcaaatgataataaaacatcggctttgacagatgggaaccacggtacagaatatagtgaactagaatcatcatactactcaaacgatgaagaaattgaaccaatgaatccatatgctccaaatatcttatttaaacatcaaggagttatgaagcaatcaggtggggaagacaatcatattactttatttcatgttaaagatgacggtactgttcgtatgtctacaatggataaagcagatgattggagaacttactttgaaatgactcctaacggaggagttaagcttagaaaacaatttgatagtaagattgtagggcaagcactaaagagctctgagttaggtatcgcagaggatggtacagtatttttagctaacggagatacgtacctagaagttaaagctgacggtatttactcaaatgggttaaatgtagatgtagaccttactgagattcaaaatacattagacgagcaaggtaaaaagcttgtaattttagacatgtctgtaacaaagacaaatgaagcgcttactgttatcgcaagtaaaactgaaataatggaaacccaagttaatgatattagtagtgagcttgttattatggcaggtttaattgaaacgaaagtatccgaagctcaagttaaagatattgtaactgaagaagtgaaccttattgcaggggatattgaaaagattaaacaagacaatgtacggttaactaagttaattgatgacatgtctgacgatggtctgattactcctgtagaaaaagatactttaatgcgggaatgggttattattcaagatgagtacccaacttatgttttacaatcagatgagtatgaggtagacaagacaacttacgttagtgcctacaacgccctgagcgcttatctaacgcctttgtttgataagatggatgaaactactgcgatagacccaaaagagtttagagcgaagtttaaggcgtattacgatgcacgtctaactatcctaacagctatacttttaaacattaaagaactagcggtagaagcaatgaagaaagcttctgaagcctcagtagatgcaacaaacgcatggcaagaagcaacaaaagctcagttagatgctaacacagccaattctaaaattgcagatatggctagtgatggtaaactaactcctgtagagaagtatgagcttaaacgtgaatacgacactattgttaaagaacatcctagtgtagtagctcaagcaacaaaatatgaggtagctaccacaagctatgtttctaaatacaatgcgttggtatcttacgttacaggaaacaaactatttgacgacatgggagagactgtagctgttgatggtgaacgattaagagcaacattttcagactactacctagaaaaagttaaattgttaagagctgtaactgataaagctaaagagattactgatgagcatgaaggacgtatctatgttgcagaaactaagattactcaaacttcagaggctattgctttactagctactaaagtagagactatagagggcactgtcgaaactcatactgcggagctaaaagttcaagcagaccaaatctcacaaaaggttactgaagcacaagtagcacaacaaatcaaagacacagaaatcggtatgacaaatggcttaagaaactcagggttagtactagataacacatactggacagattgggttagctcatctgcggttgtgggaactagagcccgagtagaagtagcaggcttacctaacttagggtatggttttgaaatatcaaaaacttctacagggaacggtcataagttcgggtattatcaagaaggtgtagttgttctccctgcgacagaatacactattagtttttgggctaaagctaaaacaggtacagttactgcgactttacagaaaagtgggtctacagaagatactgttgttactaataaaacagtaggtacaaagtggactagagtatcttatacttggaagaccgcagaagcaacaaccaagattaactatgctttaggtatggcggatgctaatacaggaacagttcaaatagcaggaatgaagctagaaactggtagtaaagcaactgcttggtctcctagccctttagattcaaaagctgagattcaagatgagattgctaaaactcctatcggaggaacaaactacatcgcattcagttcaggtaataaagagtacccacgactaatgattaaaaatgtaggttactattcttcaattggtgtagaccgttcatttgatggagaaactgttaagttagtttctaatagttcaagtactaatagctattatgatattggtatatcaagtgagggtattgctagagtaggtttgccaaattatggtttaactgcgttgaaagatggggactatgttacattttctgccgatgttagtgtaacaggcggtactgctagcctacggatataccttttagacaacggaacatggaaaacttttctttctgaccctgtaactcctgctgatggagttaaacgtgcggttgttattgcaaaaatatcttctgcaactgaaggtatttttgtgtagggttttaggtgattcaaacgccaaaaccataaattttgccaaaactcagctagaaacaggaatgaaaagtactgcatggaagaaatctgatttagatttacaaaatgatattaataatgccgtaattgatggagttaatgttattgatagccgtatgggtaacctagttactaatggttacggtactctagggtctaacaggaacttcggggctttggtatttgacccactagataagaccgttgggggaggttcctttaagtatgaatctactggtggaggtcaatggtttacagatgagtatattcctgtaaatccaagccacatttatgaagcaagttattacgctaagtctaagtttggtacatctagaagttatttctgttatgcaccatatgatgtagataagcaaaagattgatgttcaacattgcggaggtttaatctttgtagatgcaaaaccgacaacggttaagttagctaagcctcttaaggttggagatactgaggtttggctagatgatgtatcacagtttcctaataacttaggagataacgcacatcaacacagtattgccctatggaactataccgatgatagcggtaaaaactatggtacaacctatacaagatacacgtatacctacgcgtacaagaacggtgctgttgatgcaactaataaaaagataacattaaaagctccttggagtatcagaaataaaatgacctccgatggtagtttttcctgtaggacaccctgtgtctaagactaatgcaggtagcggatacatgtacccaaataatcatagtaacagaaccttaactacgagctacgcatcaataacaaacacaactgcaatggcaacggcaggtggggcacctatgaatagtgcaactacgtatctaaaattaggtttactatgtaataaggatgtcacaggtggagatactacgtatataaacgggttatctttagttgactctacggataagcaagacttacaggttcagattaatggtaaagagggcgctatcatgaaacaacctagcgcacctactaacccctgctgtaggtctgatatgggtagacacttctgcggtaccgaacgttgctaaccgatgggatggtacagcatgggttaaaatgtcacctactgaggctaaagagattggagcttttaatgattccgatgggcgtgacttgattgatagaatgtcaagtgcggagcagaaaataacttctgagagcattacaaatactgtactagagtctaatgactttacatcactatttgatactaaagcaaactcagaagatttgctagacttagctacgatagaccaattgaacagtcagtataattcatttgaaagtttgctagagcaaaaactaggagaagcgtacagcaccttatatgaaagacagtctgagttagaacagcttgttagtggttttgattttaaaatccaacaagcagggggtattaacatgctaagaaactccctaggattctcaggactagacttttggggcgatactagtggtaatggtaggaactactttagtaaagctatcgctatccaaaataaacaaaacgtagcaggtattgctcgcaatgatgtaaatggtttcgactttacaggaggacaaaattccccaagagcaatacgaatacctaaggttattacaggtaatggtttttggacagtttcagggtatgtaagaggtagtcaaaatgtagctgtagggtttaccttagacatttgtgataccaacccaactaatataaaagctactgctgataataactggacatactttgaagtaaccgcagaggttaaaaactacaatgcaacatttaactttgtagactttgataatataacccattgggcatattattttattaaagactttaaggtagagcaaggagaaagtgctactgcatggtctcctgcacctgaggatgtttccgctgatggaactaatctaacaacaacaactcaagataacgcattagctaatcttggttttgggtcaggatttgttcataaagcaggtggggttcggttaattcagaacgtggtaatgcctgcaagagggacatatacaatgtcgttctttatgaaaaaaatctacgagctcaggtgctcatggtggagcaggggttgagttgtttgcagacggtaaacggttagccttcatcggtgctgaagagggtgttgcggttggggagtactcgaagtattcttatacgtttgataccgcagacttaaatatatctgttcaaatggtagcatggggtaacataaacactacagtaacaatgagtggtctcatgtttaacattggttctttagccttaacatggcaaccattcccttctgagatatataacacaaacgttttgattgacattaacggtatcacagttaagaataatcagacgaatggttataccctaattactccaacagagttttcaggatatgctcaggtaggtaatgaaatgacaagaattttcactctgaatggtaaaactacagaagtagaggaaattcaagttagaagtaaaatacagatgggtgcaatcacagtacttccaattgattctgacaagaacgttggttgggcattcattggctaaaagggggctaagctccctttttgctgttattgtgctataattatatatgagaagacttatttaggaggtaaataaatggcattaagtggaaagtggacaactttattcgcaaacaatgcgtatgaactgattttagagtggagtggttctcagaacatctcggctaatacaacgtcagtcactgctatattaaagatacgtggggtaacttcttactctacaattaatgatgcaacagcaagtccaactaatatcagtattaatggtaacaacaaatcatttaaccaaacatctacagttagtgcaggacaaacaagagaactaggtaggcatactgtaaacgtagggcataatgctgatggttcgaaacaaataaacatatcagcaaaccatttttgggatattaactggtcagggacaggacatcaaacgccttcggtgggaggtaacgttgctttaaatacaataccacgggctagtacaggttcgggtagtaattttgtatttacaggtaacagttctatatctattaatcgagctagttctagttttactcatgtagctcgtatacacgtagatggaacttttataaaagaaattacaggtttaggtacttcgggaacttttaactttaccgatgctgagagaagaaacatagttagcaaaatggcaaacagaacaagtgttcaatgtagagtggatttacagacccgaaatgggagtaccgttatcggtggttggacatccttcacctacaatgtaacagctcccgcaaaagcaggaggtacagtagccgatttcactattagtacctcaggattccctgtaaggttaaataactataatacaggggctaagttcacatatgatgctacatggacgtttggttcgtttagtaaaaaagttacaggtgtagcccaaaactttacgttcccgttaacacaagccgatgtagatacaatgttgaacatcctaaagaataccaacacaggtgtaggtagtataacagttcagagtttctttgatggagttcagttcggaggaaacacctcaataggttctataactgctagagtcgatacaactttgtatgctcctgatgttaaagcaggtagcacttacaaagatactaacactaaatctgtagcacttacaggaagtgaccaaattattattcaaggtgtatctcagatttctgttactattcctgcaaacctaggaacatctcatggaggggcaacattatctaagatacgagttgccttaggtggagctacaaaagaaatagactacacagctaccgcaacaacgatagctctaggtacaacgaatgctaacagtaatggtaacttaacagttaccgtaatagatagtcgtgggaactcaggtttatggagtacttctgttactatattaggttatagcaaaccacaaatatctcctgttattgctcgtgttaataattatgagacaacaacaaatattgcactttcaggaacttattctcgtgttatggttaacggggtagagaagaacactattgtatctgcacgagttagatataagcaaaaccctagaagtgatatatggagtgctgacttagatttatcttttaatgcaagtgcaggtaacatatcatcaccacctaacacaacaatcacattagataacacatactcttgggttgttcaggttgaagtaaaagataagctagacacaattactacttatgagacatttgttgctgaaggtattccactactatttttagatactaagctaaaatcagtaggtataggtatgttccctaatacagaaaaagctttgcagttagctatgggttacaatttgtatgcaacgcaggtttttgcaagtaatgttcagacaacaagattagaatcccaaacagttaaggcacttggaggctatgaacctatagaaattcctgccaatgataatttaaacaattacatgtcagcagggttttatagctgtaaactaacagcaactgcaagtacaatagcaaatactcctgtaaattatgcgttttcattgttagtagaacaacacgcaggagctaagcaaacttttactacctattttgaaggagcaccaaaaacatatgtaagaaacttttataatgggaattggggtgcatggcaaacaggtggggatattggtttaacatggaaactaggtaatagaggtatcgggtattcaacaacagctaatattgtacgtaaagggaatactgtaaccgtatcagtgggtagacagataaaaaactggtctaccgcaggagagaatgtatctttaaatgaaacaatcccaacagggtatactcctattgatgaggctacgttagtgttaacacgtaatgcagggacatctttttccaacccatacgtatccatattgcatctaacggaacattaaagtatacaaacactcaagcaggaagtgcagtagttacaggtactgtaacttatgtaacaagtgacccgtatccataaaataaactagaggaggcaagataatgccacaagcagacggacatacgtcatatcttagaagaatagcgcttgagcttgccaacggaggatggtactttttcaagataaatccaaacaactatgcgcatagtgaaccacaaagagcaacaattcttaaaacaaagtcggatattatcattgaggattttggtaaagatttagagacaatcacattttcaggtacaacaggttgggctagggatgctcaaggtcgtactggtgcagatagaatgcgtatcttacgttcttatattcgagactacgcatcacaaggaggtaatggtaataggtcagtaaatgagctgaccttccataacttcactgatggggaaagttatattgtacatttagctcctgatgctatctccttggagcgtgatgttgaacaaccaatactttacaactataagttaagcttagttgttattcgagatgcaggaacgccacctgatagggaagtagttgaccctaacattgggaacaacgtgcctagtattggtggagataccgagaacactaatagtaactcaagagaggctattaatcaaagagtaatgtctacaggacaaattataggagctagtgctttagctagtttctcaggtaatggggagaacggagtggtaaaccctagagggactatcggtgcttataaatatggagtagatgaaataaaacaacaaataggttatggggagggttaatatgtcaaaagtaacacaatcatcggatttgatgagattcatttcaacattaaatattgaccctgaaggtgatgtcattctaaatgtgatagacaccgaggagcctaactttatttctaggttttatactccgcaactaaaagttagtgaagcaggttcaagagttagtgataagataaatcttaaagaaatacaacaaacaggtaaacagttaaacaataacaccttgacagttatgctaataaatagtaatcttagtatcatccacccgtatatgtataagctagcacaaagtattatacttgattcttttgctctagtttatgcaatcgaagaggacacttcgttacttagaatgttagaatctaaggacttattacaaacaacgcaaaacattaaatacttaattgatttcttaggagataaagatgagtatgtagaaatagttgagcgtttgcatagtttaagtgttgcggtaggttatattgaaaaccagttacctttattaaagggtggtgcaaatggctagatataaaaaatatactatcaagcagggagacaccctgcaaagcattgcacataaggttacaggaaacgtatcggattgggttgcaatagctgagtataataatctaaagtatccgtatattgttagtgatgactttatgaagttgcaggacattgagcacttagttgtgtggggtgaccaattaattataccttttgaagctgacctactagatacagatgttaataagttaaacaggcgtgaccaagactatatcattaatttaactttcggtagagacctaaatatgacttcagacgaaaaatattacaatcggtatggtacgagtgatgagttgttagggttaacacataactatgcaggagatgttgctactgtacaaggtattgaaaacttaaagcaagcattaactgctaaactacttactcgtaaaggttctttactactacaccctgaatatggttctaaacttcatgagctttttggtaaagcagacgaagttacaatgaagcttattgagatagaagtgtgtcgagtagtacaaaccgatagtcgagtatcaaactgcgtattagactccgcagaggttaagggagatgaatacacaggtaggtttttagttgagatacggtcactgagagaatcttttgagctgttggttcaaggagacagtgaaggtcaaatagtcgtagtagacaaggaggaataaaatgagattaaaaagactatcagaaatattatcacgattgattgacgtaactcttgtcaatacgagtgctattaatgacttcacagtaggttctactattttgtcaatctatgaagctttttctatggaaatagagcagtactatatgctgagtagagaaaacattatgtggggtatcgaacaaggagtccttaacggatttaatttctataaacgagaggctaaaaaagcttatggtgaggtaaccattgagttccacactatcactcaggatgcactagttattcctagaggtacacagttcgactctattatggaaggttaccaagggtctattgcttatgaaacaatccaagagtatttaatacccgcaggaaccgtgacatttaaagtagatgtgtatgctactcgtgcaggagatataggtaatttacctaaaggctatattaaccgcatgattaatggaattggtaatgttaaacgagtatttaacgaagaagacttcctaacaggtactgaagaagagagtatcaatgatgttaagaaaagatttcatgcgtttgtagaatctagaggtagagccacagtccaagctttagactatggtactaggcaggttgaagaagtatcaggtgtttatatccatgagcaagtgggtcaggtagagatttatgcccatgatagaaatggtaacctatctcctacaatgattactgctattgaacgtgagatagaaaattatagacccgcaggaattaggttgttagtttatcctgtaactaaaactctgttacctgtagatattacagtaaccctatctaacaagagtcgggtaaactcggagacagagaataaagtaacatccgtagttcggaactacttaaacaatcaacaagtctcacaagaattagtgttagctgatttgattcaagcggttatgaatatagatgatgttcttatttatgattgcaagattgataattacacccaaaacgtaaaagtacaaaagtctgaaatcattagagcaggagacgtaactgtagacttaatataggaggatattatgggaaattttaaaaaacatatacatcctctgcttaagagagataaacgactagaggttaaggatgacagtaactttgccatccttaatgctctagataacgttcttaacgaagcagagcaagacacaataaaaagcaaaatccaatcctcactagagacagctacaggagagttcttagaccgatggggtgattggtttggtatatatagagaagttggtgaggaagatgaccattacagagagcatatcattcgacatacgctcttacctagaggaaccattcagtcaataattgatgcaattaaatggtttctaaaagataatgatgccaatattgaaatatatgagccgtggaagaatattttctatactaataactctaaattgaatggagaagaccatttgatgggttattactataggtttgctatcattgatatttccattgatagacctttccctcctgagattattgacatcatatgggcgtttaaacccgcaggtgtattattttatgtgggatacgattcaggaaatgatattacctcagagcatgttaaatctccttatgcggaaatgactatagataacattcaggagctagaccgattaacaggtttgggtatagaggttagaggttcagctaagacaactgatatacgtggggatgcagtaactagtaacatattccacaccaacaggtcattgttgaatggggaagatgttttagcaggtgcgtttgaccacgggagagagcatattcatttatatggaacagcactcaaagagactggaaatatcctttccgcaaactctaaacttgagaagactgcaagtcgagagtttgttaacagtcctgattgggatttagctcctgcaataaatactaatggtactgacatatggtacaaagctactttcgagttaaaactagcagtagcaggttctgtagatttttatttccaaaatgggacaacaacaaggtactcattacaagaagtagatactatgggaaattcagatatgagattttcttctaacagagtaactatttcaaatgcaactacggaatataaaagatataccttacgttttcgtgctagagtatcgaaagcagacgagccacaagctatgttagctttctttgccacttataatacaggaaagttaattacagttaaaaacctagaggtgtttgctgaggtaactaaaccaatagatgtattagacacaactactcttgcggaagttaaagcccaattaactgaacttgataatgtgagctacgcttctctaggtaactatgatggcttagtagatagacggtctactgaagataagtacttatacgtcatcttcaatatccgagactacttaagcataaacttccctaagtcttatgacaagttagtcggaggcagtccttctgtagttaataagggtaaatatagttctttcatgaagaaccctacaatatcttttgtcttacggtctcttactagcccaacaaacccaactaagttgaaagtaaagttaaaagactttgaactaaacaaatgggatgttatatcaagtaaagacttgacacaagtagatttgttagctaatatagaggtaggaaacatagagagttatatctcttctgaaggtctcatagcaattcagttagatgttactaatacagctaaggttcctgtagatattgactatgtaggttacacatttacaaacaaaatgactacaggttatgatataaataaatcattacttgtgagtaacatttctgaggttgtaacagcctaaagcataaaatctatggtataatgattatagggtacttttaagtgccctattttgcaattatatgctatattaatagttagagacaagtataggaggttaataaatggcaatagctactacagatgctagagtacaagctagtttagattatgtgaataaagcaagcagtacgtatctagcaatcggaaagaaaactgcatggacaaatgagaatactcctcctgcggaagacccaaacacctcagtattgcaagaagtaattgggtataaaaaagtagataaagtaagcctgtgtaaaccactaacacaaagtgagagtacttcataccctaccataacatatggagggtcaagatatgctttgattcctgtggataaggcttatcaagaaaaagctacactagtttattttgaaacagaagtgttaggaacagatttaccaacaggaacatatagacaagtaggcatccattcagggttagtacctaaagatggagttacaaagaaagtgttattacctactgaggttaaaagtacaggtattctacagttctttgcaaataaacaattccaaaatagaacagaagaagtacgaattaaagagagattcatcctctcagtagccaacaccaaagaaattttataaggagtgagaacgtttggcaacagaaatcaaattagaagatattaaccaaacaccatatcttagccgttttagagcggaacaagacagaaatatggtactatacagacctgatagaccattgcaacaagctgaactaaatgaagcacagcaaatggctatggacggtctagctaaactaggtgatgcgttccttggtgatggtaacctacaatcaggtatggatttcattaaaacaggtaacgaattgacagttaaagatgggttagtatatcttaatggtcgagtacgaaactttaagcaacaaacagttacaatggcaggaacaggaagagaagtagttggggttaaactacaaagatatgttatcacatctgaggatgaccctacgttactagaccaaactagtggtgttccttctgccttctctgaaggagctgatagacttcaagaagtggttattttaacagttaatgataacgcttctgctcctgtgtacatctttgatgagggtgaactattcatcaatactgaaaaccctgagatggataagattaacaaagtattagcggaaagaacttacgatgagtcaggctcataccgagtacatggttatgacttgtacacagagaaacataagactaaatctgaagagtttatccaattagtagttgacggtggacgtgcttatgtgttagggtataaggtagataaacctacatcaacaagattagaccttaaaaagtctaaagatgtacgttcagttaacaacgaaggattctattaccaaaacgcaactcgtaagagtaaactaggtaatgctcctgtatcaagagttacccgagttacaggtcaagtacgtgtaactaaagaaacagttaaccgaggggtaacttcaggaggtacagacttcttagcaaacacttctgttattaaagtagaaaaagtttggactgaaggagctaatgcaaaagagttccaacaaggtacagattatcaagtaattaacggacaatcaatctcatgggcacctaatggagcggaacctcctgcgggtagtacttattttgtaacatatatttataacaaagctatgttagaaaatacagactataaaatcaccattgagggtgaaggagataaccgtgagtggtggattgactttaacgggatgacaggttcgaaacctgtagacgaaacactagtaaacgtagactatgacttctacctagctagaacagaccttgtggttattgatatgaatggtaacattactatcaaagaaggtcaacctgagtctcttcgtttagtagaagcaccaaatcacttagacccattaactttacgtctaggtacagtaactgtttaccctgattctgataccgcaattgctcgttcattctctattgatagattgtctatggaagatttacaaagattaaaattccgtgtagagaacattgaatataacgaagcggttaatgctctagaccaacctgcaatggcaggagagaacccactaaacttacgtggagtattctcagacggtttcatctctttagataaatacgatgtaagtcaccctgatgcaaaaattgcttttagctttgaggatgcagaaattacattaccttacgatgaagctaacaaaattgtccctaagattttggaaggtgactctaacgctcatgtttggggtagattggttactgcaccatttactgaggttgtagaaattagacaacctttcgcaacagaagcaatcaacgtaaacccatataacgtgtttaaccgacaagggttactaaaactggaaccttcagccgataactggattgaagaagaacgtattacagtgacacaggaagaaacatcaactgttaacattaaacgttggtggaaacatggttctgagtcttgggtacaagatgaaaagaataaatatggtaacatcgttctagatgatggagcttcatggacagactaccaaggtgttaaaaaaggtgccgaaggtgacatcatgggtactattatgacaagtggtggacaacaaacaatggacagcatgattgagttcatgagacaaattgacatcaagattgaggcagagaacttactacctaatacaaacaaccttcaagtatacttcgatggtttagcaattcctgttactcctgctgaaggatataagaaaggctctgaaacaggtactggtatctctaatgcagacggaacattcaaaggtactattacagttcctgcgggtatccgatgtggtgtacgtgaagtaactatcagaaacaatgataacatggcttctgctacgtatacagctcaaggaactaagaaaacaactaaagatattattgttagaactcgtgtaacaattagtttgtatgacccattggcacaatcgttccaattacaatctaatagagttatcaccagtttcggtttacactttgcaagtaaagaccctaaccacaacgttatcgttcaggttcgtggtatttcagaaggtggacaacctaacaagactatctatgcagaaacggtacttactcctgataaaattcttatctccgatgatgcaagtgctgagacaaaagttaagtttgatgacccgttaatgattgaggcaggtaaagagtactgtatcgttgttatcacagattctgataaatacactatgtggtgtgcaacaatgggacaacctaagattgacaatccaactgagactgttaactctaacccatacctacaaggtgtactattcagctcatctaacgcttctgcttggacaatccatcaagcaacagatatgaaattcactatctacacagctcaattcaacccacaagctactatcgaatttgatgttatgaaaaatgtcaaagcagataatcttgtattgatgagtacttacttaactcctcaatctacaggttgtgtatgggaaatgaagatagttatggagaatgagccaataagtgtaacggttgacgacaaagaatggagacctattgccaattacgtggatattgatgttaaccaagtagctagagaggtaaaacttaaagctacatttgatgccaacagatttattagtccgttgttgtcattagaagacattatgttcgttgggttcctaactgcactaaaaggtagctacgtatctcgtactattgatttacgtgatgcaccatttaacacagttaaggtttcattcgatggattcatgccgtcaaacacgacagtgatacctcagtttagcctagatgaaggtaaaacatggaaatcatttactaacccaccaacggtaactcagcaaactcaagagttcaataaacttgaatacgcagagaaggttgcaacaggtacagcaacttataaatcgttcaaagttagattaaacatgacaactcaaaattcattccttagacctcgtgcaaaacgactaatgtgtctaatgaagagtgaatagtaataactgctcctacttatggtataatgtaagtaggagttttatttttaaggggggttaacatgcctgaaatacacagacaatcaaaatcaggggctctaatatttaagcctacaatccaagaacaaacaatggcagatacgcaaaaggcacttgacgagaagtcaaaggcgttggatattaagctagccgaagtagatagtttaatagaaaagtttaaatcactagataaagtctaacatggttaggctttttttgtattgacaaatacttgagtacatgttattatagatatacaattaaatcaagtagaattaaattgctcctattgtggtataatggatatagatacaataggagggaaacaatgaagatacttgtagatattatgacctcaaagattatttttgaggaaggggaagaacaattgattcccttagtccaagatgcgatgcacagaaacttaggtgtaaagcaagacggatatttttatagccctgcttacaaatcagggtattgggacggtataatagatttttacaataaagaagacgactcattccatacaggattgttaaatcaagtagactctattttaggggagttgcaaggaacctatacatttacatacagtattgtagatgatagacctgacccctttatgaaccctgaagatttacctgacaacattcaattgattggagacggggatgaccctatcactttacgagattatcagttcgatgctgtttttcaagcaatagataagcaagtaggtattgtggaggttgctacgaatggtggtaaaactgaaataggtggagctatcatgcaacaattacttccgtatttagagagaggagagcgtattgcattcttcacgaataactcgtcaatctttacacaatctattgatagaatagagaaacggttagggggtaaaagtaggtcggtatggtgcaggacacaaagactttcagcaaattacttttgtgatgatacctacattaaatgcaagtttaaccgcagaccctgaaaaagggcttaaactaacaggtaaaaatgctgttgttaagaaaatagctaaggaaatagccccaagactagctaaaggatataaccaaagatttgctttacgcaaccttattaaaaattaccctaagaaatccaagatggatgaaaaagttttaatggaacttgaggatgtactatacacctgtgggtcagacaacgaaataaagttcaggattcaaggatacgaagctgagtatcaaaaaataattgagtctaaaaataagaaggtctttgataaatacaatgaagcagtagactttttggagtctgttgctgttatgatagttgatgaggctcaccatactagtgcagatacttggtaccattcactaacgaaatgtatcaacgcacagtatagaatagcattaactggttctgttgatagaaaagacaaaatgctatggcagagattgcaagcgatatttaataagaccattataaaaatatccaatgagaccttaattaatttaggacattcagcaaaacctaaaataactatgttccctattgttagtccacaaggttacgatgaggcagattatatgcctgctagggagttatgtattgttaataatgaatatcgtaacacactaataactcaattagcaaacaaggcatactctgagggtaagggtgtgcttatcttagttaatattgtggaacacggagacataatttctgaaatgctaacgaaaataggtgtagagaactcctttatacacggagagttagaccttgattatagggaagagcaactaactgctatgagagaaggtagactaaaagttttaatagctactacgattgcggatgaaggtgttgacatttcaggtattgatatgttaatattaggtgcaggcggtaaatcactaagacaaacacttcaacgtgtaggtcgagccctacgtaagaaaaaaacaggggagaacgttgccacaattatcgacttcattgactacacaaataaacatttgttgaagcattcaaaagaacgtagaaaaacatatgttcaagagaagtttgatattgaagatatacaaataaactaaagggggagagccactaaatgtgtttgacagcagaacaagtaattgaatttaacatttcagatggcttccttacgtttataaaccatttaactgctaaatcagctagttggggagacaacttagcagtaacttttcaaagaactaggctagcagaagagattaatgtaagtgtgagaacggtaacgaactacattcaaaaagtaaaagaattaaactttggtgaagttgaggctaaaaaaggaagaacaggcggggggacagtaattgtgtttaataaagacattttaaattttgaacctaaagaaaatccaataacagcagacacaaagactgctgaagaaattagagatttgatgtttccccgagttattaaacctcaaccacttagaaagtatagaactaagaccgagataaccgaggctgagttgcttatcaaagctcgtaaaggcagagagtgggaacttaatgagatgcttgacactatgcctcatgttacccgagagttctttgataattttgatgagcctgagttgtattacaaagcctatcttgtctctagaatgtataatgcctatgcggttatcttcccaagagaacggatgcttcagcatgtggatgacactaggctatacaatttgaacaaaaaagctatggaatacgcacagaattgggatgttttaccttatcattttgtgggtactcctgcatataacgtttttgttcgactacaaagaacttttgatgagaaagacataaacccactagggtacttaacaactcagtttgattatgttactttcttagctgagcataaaaaagctagacctaatgcactaccttatgttaatacactaatttctgatgatgctatggaacgttataacaagcagattagattctatacgtggacacgaaatagatttaatgaccgtaagatgagtaatgagcgggtactgtatatcggagctaaataccctattattcaagccttacagtttgcatacaaaggtgtttcaatgggtggtaacttaagcaacttgatagatgagatgtctgttaatgcaatgcggttaactaaggtggactatggagatttaggtattgagctagatgctaacgatattaagcacaataactatgttcatagaatagaacggttaactagatattacaacacagtattattagaccttaaggatagcgatatttcagaagctgataaaaatattatccgtgcttatcttaaagagcaagtagccttatactcacaaaaaaattctctatcagcaacccaatacactcttgctttccctacacagatacacgaggttaaacgtactgttatggcaaacaacgctgatatatctaactactatgcgtatattgggaatatgagcaaggaagagattacaactttagaagagtttgaacattatgctaagcaaggtgagctgatggacttctctattgaaggagctaacacattcagagaaactagtcgaatgattgctcacgatacaggtatcggggttaactctcatgatgtaggtgaagcaattcgaaactatggtgttgaaaaaatcccaattgataactttgggatgttggacttagcacagataattaatattaaggaggactaggacatatggggctaaaggacttatttaacaattggcgctacaaaggatacactagtgatagtgaggtagctagtattagagctaaacacacaggagaacgagttaggcatatagaacaactagatgcgatggctaaaaagtatgattctttggaggaagaacttaattctttaagaaatcaattgacatttgtacccaaatttgataagctacttattgacaataagcaaattgttcaggtagcaaactctgtgattattccaccacatcaacttgctatggttgatgagagtgttatcaaccaagagaagttgattgaataccacttaaaagaagtggaggatgcgctattagactcggttagagaagagatagctgttcaacatgaatacacagaaagaggcttagaactaagagcaaaattatttatagcaaaaaaatagggggagcaaaatgtcacaaacacacatccaaaaacaaatcctatacagagcgattaaagaccctgtatttgcaaaagaaacgtttactaagatacctacaaatacttttaacgatgataaggcgtatattgatattgccttattaattaatcgttattatcaaactagtaatgttcctttagataaagaaacattgttggttatgttagaagataaaatggtaaaaacaaatgctaatgcagaaaagcaacaagcattttatgacacggttaaagatttatacactattgattcattcgaccaaaatgaggatgttatcaatgagaacatgcaaaagtatattcgtaaaacacttattcaacaaactttattaaaagaagtaggtaacggtaatctagaagatgaggatacaattaataaccttattagtaaacttcaagatattgctatcatgagtgcgggtggcgggggagaaactatcaacttcttccgagattctgatagtaagaaacgattacttactcatatgcacaagaacaaatttaaaacaggattccaagctattgatgatattgcagacggaggattggctcgtggagagctcggtttaattttagcaccctatggtggtggtaaaactacatgggcggttaacctagttcgtaactacgttatgcaggggcttaacgtgctgttcttgccattggaggaaaaacttgaccgaatggtactacgtttcgaacaagtattctcacagcaagctaagagctctttaatggcaggtggtgttttgaatgattcactgtatgaagaaattcaaaaagcttataatcaactattaaaccctgaaggtcaaaaaggttggggagaatttgtaattgctaagtatatgcctcgtacattaagccctacaggtttagagcaagagataattaaccaaactcttgtcttgggtaaacctattgatgttgtcattattgactaccccgacttaatgattaacccttttgagaaaggttccgataatgaatctcgtgcaggaggtaaacttacagaagaaattcgtagaattgctcaagaatacaactttttaggttgggtattctcacagttgaaccgttcaggtgtagcttctgagtttcgttcagcttctatgattgaaggttcaaaacaaaagctaaaccctgtagaaattgcattaactattaaccaaactacagaggaacaggagcaagggtattctcgtatgtatgtagataaactacgtaatagaacccgagcagattttaacagaatgttaccttttaagtatgttgatgaaactatgactttgcgtgatttaactgaccaagaggtactacatcatcaagctatcttagaggacttagaagaaagtgtaacaggtatccgtaaacagaagaagaaagaagcacagtacaataaccaagatgttcaaaacaaactaaacgggatgaaccaagcactacaaggaggattccaacaaccagtagcataataatatcaaggaggtataacatggaaaagtatacagtaactgttaactatggtgagtatgcagaaggtatctttgatacagaagctcttgctgatagctatagagcaaaaaagatattaaaagatgagcctgatacaaacgagagtatgactgaagaagagctcctagcgtatgatgccgatggctattatggaacactaccaatcagaatgggggaaggttgacatgaaatattgcaaaccttactccccactatgcacttatgttcagtggactggacataaccatgaagaggtagaggcttttctaggggctagtaaagtagaatacgacagtaagttagagttgtactatgctccaagcttgttagctaagaaccatataccgaaaggatattacattgtagattatgggagacacatgggtggaaagaagatgatacaccctaacatgtttccaaaaatgtttaaggaggtaacacatgactagtagtaaaaagaaaccattggcgtatttattcaccgattttcacgcacatctatttaaagatttttcacaccctgatgctaagtatcatacagataggttcaaagctcagttagatacattagagactattctatgtcaagctagagaggatgacttacctgttatctttggtggtgatttatttcataaacgtatttatgtagactctagagttttcaaccctgtctttgaaatgttcgaggcatattcagatgtcacagtttatatggttagaggtaatcatgatagtgtaacaaattctttaagaacagttagttcactagatactttcagctcattaccgaatgtaacagtgattagtacacctcaaatcattgtacaccccacattcatgttgtttggtctcccatacggtgaagagaccgaggaaatgaaagagtggttaactaagactgctgatacacataaagacaataaattgcctaaagtattagttgctcatgttggtgtagagggtgcaactactggaaagtattctcatacgttagaaggtgccttcagagcctctgatttgctccctgaggcgtttgattatatatacctaggacattatcacaaaagacaagaactgctcccaaacatgatatatggaggaaatacgatacaaacaagtttctctgatgaagggcaaactaaaggttatcatttactttatcaagacggagataaagtccaaacagagtatattgagatacctaataaaatgtttatcacaattacaggagatgaaatcccaagtgatgacattttaagaaacaattatatcaggtttacgggcaatgaggaacaggcaaaaatagttcagactattcgtgatgaagagaacttaactaatatgcgaataacggttcagaaagagtacaacgatggttcccgattaggtattacagcagaaacttcggaagaagaaattgtctctgcttatgtagaatctaaagagttaggggatgccgtagagcagaaagcattagcttgtttaagagaagcaaaagccttgagttaagacccttaaagggtcttttttgtattgacaaacaagtaaatatgtagtatactaggtataacaaataagagaggggtaataaacataaatgtttatctttaaaaaggttactatagacaattttaggtctataggtcacgttgagctaaatctagacaaccaaggtttagttcttgttgaaggtgttaataatacgaaccaaacgtatttgtctaacggttcaggtaagtctacgatgctctctgctattccgtgggctttatacgacataacacccgaaggtgcaaaagcagatgacgtgattaataataagattggtaaagacactagtgtaatactagactttgagattgataaattaccttatcggatagaaagataccgaaagcataaaaaacacaagaataaggttcttttattccaaggagaaaatgatttaactcaaagtactgttgctaacactaataagaagatactagaactctttggtattgacttaaacacgtttcttaatagtatcatgtacggtcaaggtgatgtggagatattcgcaaaggctacagataaaggtaagaaagagatacttgagaatgtggctaatattgcagtatatcaagaagcccaagttatagccaaagataagctagctcaggcaaggttagctcatagcgcaaaacaaacagagttacaaactttaaacgctaaactaggagacttaacttatcaagaacagactgaagctcagaattataaaaaacggctgatttgattaaacatcaaaaaacagtcattgagggtctgacggctgatttagccaacgcacaagcttcggtagaacaaataaaagaacagtatgcacaacagaaaacagcattagagcaggagttagctactatcgaagaaccacctgtacctcaagacttggtggaagactacaaccagtttaatgcacagattgtgcaattgaactcggcttatcaaggtaaacagcaggaaatagccacacttcaaaaaaaatatgtctagtttaggtactagcgatgtctgttatgcttgcggaacaaagttagatgtatctcatcgagaagctgagagagagaagttaaatcagcagataacagctattgaagagtctatcgcacctactgcatctgcgttacctttgttacagcaacaacttgaccaaaagaagaacgacttagataatatctattatacaattaatgatattaaccaacgtaagcaagaactaaacaatcagttgattacgctaaataatcaagaacagaatataggtacagaagtcgcaaatattcaataccgtttagattctagtatcgaacagctagctaatttagaatcattacctaagcctgttaagaaaacagcagagaaaaagagattaactcagctattgttgtagctgacaacgagttaaatatcttagcctttgaaattgaagactacgatgtattaataaataaagtgttttctaacaaaggtattcgttctcatgtgctagacttgactactcctttcttaaatgaaaaagctaatggatatttagctacactatcaggttccgatatacaggttaatttactcacacaaaaattaaataaagatggctcactgagtgataattttgaccttcaagtcgttaatggtagcggaggagaagactacaaaacaaactcagcaggagaacgtaaacgtattgacttagctattgcgttagcaattcaagatttaatttttagtaaatctaacttagctactaaccttattgtttatgatgagtgctttgacggtttagacagcataggctgtgaaaacgtaattgacatcctaaaagataaacagaagactgtaggtagtatattcgtaatcacacataatgaaaatttaaaatcgctatttgagaaagtgattactgtagaaaaagtagacggaatcacctcattagtagattcaggaggaaaaagttaatgagaacagacattattaaaaaagggggaatacggaactcttcaagtaaacggtaagtttaccagtaaagacatgggagcagtcatgtatgcaagcttccctgtaaaaacattatttgattggtacccgttgaactcccattacacatataaatacagtgagaaagaggatatgttctacttagcggtagatacagacgggctacttattcctcgttatggtctagaaaacaataatactaatggggttaagaataaacctagcatgggtaaaagtttacgaacaggggaacctacatggcggaatgaagaagtgtatctccataatcaagaagtcattggttttgctacccgtttaggtatacgtagtccttatgaggatttcacccttaaagatgtactagatgggctatcggtatttcaaagagcccttgatgctatgtacgatgaagcaactacaaaatacattcagtatgacgtaaaaaattctaaagatagtcttgacaaagactctaacacatggtatgatggtaaagaatattaccagtataacccacaagatgtaaaacagattacaggtaaagatgaagaggcacgagcggagctcgttttagctaatctgaaccaagatgaattggagttatactacaagttaggtgaagtatacactatgcttatcttaatgcaaaaaatagcaatcgctagggggtagatattaaatggcagtagaggattttttctcagcagagttgggtattcctaaaaacctaggagacgaacttagatacaactgcccgttctgttctgccaatgatgaccacaagttataccttaacattggtggtggggctagagacgggttatggcattgttttaaatgtggctcccgaggaaatccaccatcatttgttatgcaactctatggaatatcttatagggaggctatcgaggagctacaagcttacgattatgaccctgaacagaaatgggtgtctccacaaacactagggctgactgatgaggagtacttattactagcgctgaagaatgaaatacagcctaaggaagagttagagcacacctatgttgccccacctttaccgatggggtataaacgactagtagataacttacagaaccctgaggcgtatccatttttgttatacgcacactctaggggattttcattacaagatattgcgagacataatatagggtacttgacacacagtgtggttaacttacctagtggtaaaactttaacactaaacaaccacctagtttttctatcacatgatgactcaggtaactatatatactggaatacccgagcaatagatggtagtagctttgttaaatctattaatgctcctagtatggatggagaatactccaaaagtactgtagtgtttaaccttaacattgctaagaaaactccttttattgtgataaatgagggtgttcctgatgccttgacagtaggagagtcaggagtagcaactttcggtaaacaagttactgaagagcaagtaaaagctatcttgaaaaatattcaccctgagcaaaaaaatatatattttactagataatgatgcgaaagctcaaataacatcactagctgaaaagttatatgttaatcataaaaacacatttatagttatcaatcctgtaggggatgatgctaataaaatgggtcatgaaaaaacgtgggagttaataaacaatagctcagttagggcagatagtcaaggaatcctaactctgatgttgtcaatctaaggaggacttatggcagtaaaatattatttagagcctattgaacctaacgattataatggttggtatgagtttgctgattgtaaactggtagactactatcaaccctattatgaagataggtatactgaagtcaagaatgagatttttgagggttctgtttgtgtactagatttctataaaaggagttcagcttcaggattttgtgtattagttacagggcattctattggaaaaccttttattgcaaacatgagcagtcaaaatcttgtagggcttcttaaaggaactcaaatggtctacggagaagctaaaggtaagtttacacttattaaaaaaggcacaaattgttttgtagcatatcaaggaggataaaacacatgaaaccaactattgatgtaatgttagacgtagaaacattaggtattgctgacgatgcacaagtcattcagatttccgcaggagctttccatctagatgaagttgttagagagcttggggactttaaaagtacatttaactttgtactagacttgagcactctaggggataaattaagcatggagttaggaactttacaattttggacatccgattccgataatgcaagagtattacacaaattaatttctgaggaaagtggtatttcagaagagatactagttcgtaaactgcacacatggcttactgatttactaaaagactactctgagattaagttatggggtaacggcattatttttgataatgttaagattgaagcattgtttaaaaagtatggtcttaagtcccctattatgttttataatcaccgagatgtccgtactatccttgaattaggagcagataagctaggtgaggatattaatagctttagaaacgattatgctgatgggattgagaaacacaatgcaattcatgatgtattatatcaaacacgttatgttacaggggcatacagtgtactaacaaaccctgaatattatttagaagtacctatgaattaaattataaagccacaaggcgtgagaggaagtaagtaatggataaattagttagtttagtagaggaatggtcaaaaaataaaggattggacaaagctgagtctagtaagcaattcttgaaggtcactgaggaagttggggaggtcgcaggtgctttagctcgtggagataaagaggaactaactgacggaatcggagatgtgtttgtaacgctaatcattttagctcagcaaaatggacttacagccgaagaatgtttgacccaagcttacaatgtaattgctaaacgtaagggtaaaatgattaatggtgtctttgtgaaagaagaagatttgaaataaccacatagttgtggtataatagatataggaggttattatgacaaaagatatttcgttaaacgagtacattacgtctatcattgcattacatgataacgagggtaagaacaaagacaagattgaggagctacgtaagttacacggtgacactcctacaacttacgatgacgtagaaaaagcaattcagctaatggttaactctattatgcaagatgttattgttggtgagcgggtgcaaggagcattcaatcagtctattatagcaatcttagtagaaaaagatgtaatcagccaaaaagatgcagacaatgtatctgacataatggataatgtacacaatcagttatataaagaattaggataggggaaaacacataatgaagaaaaaagacaatgttattgaactaggtaaaaaaactaataaagaattaggtctagaagaagctctaggcatttgggcaatgtatagtgccacaggtcgagcacctgctgatattactttagaggagctacaagctatcggtaataaaaaaacacgagtacaagacgttacttctttagtgaatggtcttatgttccgtgagcgtaagcttattgaatcacttattgatgacaatgctattaaagacatcattctacaagataagctaggggttacaaaagaagactacgaaaaagctaaggaaactcgtgctaaagacctagcagacttcgaaactcaaatgcaagcagaaattgctaaagctaaaattgaacttgctagtgcaaaagataaggaatacaacgatggtgagtaggttagaaaaaggagtgcacgactggttggttgtgcctctttcttcaaagacagggtactgtataattgcttctttggttgatgggggttctattgctatgatggagaaccaagagcctaacggagacttgcagttattcgaaacattagaagaagccctcactacagctaacattctttctgaagagtatggaggaaccgatatttgtttacgagtaaatcctgttaacgagtttctgcctatgttaaggagtgagtacagtgataagatggtcaatatatccctacaaggaaaatagctttattatcaagtatgataaaagatttgctcgaacaggaaaatccttatgggtatctgttaggtctgcaataaaaagtacctgtttggatgatgctctagaagtattcccaacgtatgaggatgctgaagctacactagagttattaataaatgattttgggggttacagagttggttgactatagtaaagtcggaaggcatagtaagactaagggctcgaattacgagctagcaatagcaaagattctaacagcttggtggggagctccttttcatagggtacctgcaagtggtggtttgcattggaacgcttctatgaacgtctcaggagatattatcactattcctgaggcaggttttcctttcgtagtagagtgtaaaaaaagagaagagtggacgttagagaacgctttcctcaacaataaagaaattaaattatggtggtcacaagttgttggtgatgctagagagacgggtaaaatacccatgttaatctttagtcgaaacagagcagagaactttgttatgctaccttacaatgaagattttatcgtaaacttcagaacagctaaccctagagtatcctccgcagaaatgtatgtggagtacctagacgaaatgaagcgccctcatgggtttatgactcacactatcttattaaaggatttagctacatatcctgttaaagagatgcaacaagactttgaccctgagtattataattgggaagaagagagtatgcttactaatagaaacggtgagtatgaggaagagctcaaagtagagcccgaggatatggaagaccatatcgcaaacctaataaataaatcaagtctttaggaggataagatggagaaatttaaccctgtaagtttacctaagcattatcagttatcaggaggtaaagaggtactagattaccttgcagatattactaatgtaatgcctactgagctgagctactttctaggaaacacacttaagtacattggacgagcacctagaaaaaataatatggtggaagacctatctaaagctatgtactatttaagagactttcaagtgagataccacttagttaatgaagacacattttcaggtgtaaaagtggatattaaatcttataaaaagcatcttaaaaacataggagcacaaaacattagagacatatcagaagagctctatagttttgctcacgatattgcagaaacctaccctaaagaccgccaattagctgtggcacagttactgcaccttgtagctgagtatgtgagtagtttgcaaaactttaaacctagtgagaaggacatttcatggttcttatacagcttacgacataaattagcagagctcattcaggatgtaaagagagaccaactaacctaactattatgttagggttttttgctttttatggtataatagagatagataaaactattatacacgaaagaggatagctatgaatgatgttagaaaaccgagaaaaaaacgactaaccgtttacaatactgacaggtattttaatataaacctaatgttgagagaagaacttgaaagtaaagtgaaggttacgaagttaaacgaaacagatattgagaagcagatggatgaactagagcttaaatccaacagattgaaagttaaagatgacaaagagtacttagtctatcaagaaagttactctaatgatacactacttaataagttaatgaaccatgcaggaagcctaacgtattacacagatacaacagtcccctactatgtgattaaaggactagcaaacaatgtaacaagtgaagctgtctttagttctagagaggattttacttatgatgaaatagataatgtagccttgacatcttcagcaacttcagttatagttgatgtaccagttgtcatacctgatattagcccttatgatattttgtttatgctacatccgttgaagaaccatgtagataaagttcagttatctttttcctagactgagacctaatgaaatgtctgagagacataaaaaatactatcataaagttggggatttttacgaagtaaaacctaagattaaatacaagtattttaaacacatacagacttcgttaagtatttggaaaatgaatatctacattgtatgtgattccaaagatgactaccaaacactagacaaaatggtacaaagagatttagacaaacgaaaccctaacagagtgaaagacagggtgagttatgatggctaaacaaaaaactattaatagagcagagctagcaggcatcatatcagaacatacgggatatacaaaagaagtggtaaaagagatactagaatctaaagacttggcagttgcagaactaattgctaaagggtattcaataaaagaccataagatgtatagactagatataacaacacgaaaagaaaagaaggcttgggatggtataaataaaaaaagatttattgtacccgagaagcaagatattaagtttgtccctttagttgagctaaaggatgctttagaaaaattaaatgaaaaagcttgacaagcaccagtgaatgtggtatagttaactcatgagaaatagggttagactataaccacatttacttgtctaaacacctatatactataaggaggagccatgtgaaagtattattcctacaagagtacgttagggatacgcatatagtgtcagatgagcaaggtatgcgagcagatttcttgtctactaatttaggtaagaaattattaaagtatgctcgaagtattaaactcaaacaagaagacatttatgtggactacacgtatgatttgatacctgaggttatgaaaacagaccctagaactggacgggttattaagtataaagaacctaaccaaactttaagaaaagaacctgagcggagattaactcaaagaattatggagttaaaacccgacattattattccaatggggaacttagggtgtaaatataccttaggtgtgcaggctattactaagcttcgaggacgacctgaagaagtcaccttgaaactaaaagatgatgccaataatgttattgctgagtatccaacatgggtactacctatttactcaatggaatacatcacagcacaacctaatacggaaagatttgtccaatcagatatgaatgtgttacagaagtttcttaaaagtggttctgaagcgtatgtagcaaaagatactgagtacgagtttgtttctactatcgaaagagtgcgggagatattcaatcagtttaaaactatgagagtagggctaactgtcccttactggttagtcgcatgggatttggaaacaaatacattgaagcctgagcttaaaggagccaaacctttagtaatttctctaagttgggatgactcccaaggggtaactattcctcttgaacataaggagttctcgtggaaacctgaggaactagctgaaatctatgctatgattaaggatttccaagaaaacaaagatattattaaagtaggtcacaacattcagtatgatattcggttcttgatgagtacacaaggatttacagacttcactcagaatagagatactaagattggctactatttagcaatcagtcaagattccaaggtgtctttacgattatctgacttagcttatgagatgacagatatgggtggttacgataacccgttagaagcttataagaagcaatatgcagaaaaacacttagaagctgaaaagctacgtgtagttgctgagcacgaacaagctatcaaagattgggagcttgagattactgaaattgaggaaaagaaaaagaactgcgagaacagtacattagagagggtcgtaaactatctcttattcctaagcagaagaaaccaccaaaacctaaaaagcaagcagttaagcctttagtaaacgaaattgatggaggagacttcaactatgaatggatacctcttgaaatgttacacccgtatgcttcaggtgacgtggactgctgtagacgtatttactatactttagagcctaaactgaaagaaagtgaccgtatgtggtcattattcacagacttttatcctaggctatcacgagctttagctcatatcgagagtgtaggtgttttagcaaacttggactacatgggtaacattgaccgtgagtataccaaggagactgaaagactaacagaagagattcgtaaaatacctatcatacaagagtttgaacaacgtaatcaagagttgtatgaaatgagtattgaacactttgttaacacaccaccacaagaacgagataaaacgcttgttaatatgcgtacccgttttaagaaaaatgggactaagttcagacctacctcttcagatgataagaagaaagttttgtatgatatgttagggataaagcttccttatgataaggaatctattgtagatactgcatgggatgcgggtatccctgaacaagagcttaagtggaaccactataagtctaataaacataacttagggcttattattgagtactacgaagagcatagagcccttgctaaactgttactagagttctctaaggttaacactttaaagaataacttcaccactaaattattagagcatgtttctaataaagatggtcgagtacatgggtctttcaacccaacaggaacagaaactagtcggctatcaagttcaaatcccaatcagcaacaactaccttctaaagtgggtgaccctagacggtttgactactcttacccgattaaacgtatgttcacgactagttttaagaatggtgcgctactgcaactcgactaccaagcactagagatgcgtgttgtagctttaagagctcaagatacgactatgacccaagcgttcttagatggtaaagacttgcatacaaacacagcatcaattgcctttaatgtgcctgagagtgaggtatcaggggatatgcgtaaacgagctaaaggtgttgcctttggtttggtatatggggaaaccccttcatctttcgcacctaagaatgatattactgtagaagaagctgaacagatatttgagaagtttctatcaagtaagcctatgattgaacaatttatccaatgggcacatgcttttgttcttaagcacggatatgttgaaaccatgcaaggcttcagacgtaaccttatgggagcttattctaaagataaacgtattcgaaatgaggcactacgtcaatccgtaaacacaattattcaaggtacaggggcatttttaaccaacttatcagtagtctttattgatgaatggttaacacaagcagggatgaaatcaaaagtagtccttactgtacacgatagtattgtaatcgactctccacctgaggagattgagattgtagctaaaactgctaaaatgattatggaaaatttacctgtagacttcttgacagttgattggattgatggtacaatgaaacggtacccaatcgaatcagatgtggagattggggaaaactataacgacatggttgattataaccctgaagaattagcagagttcaaatcagttaaagggtacgttaagtactataaagataaaaaaacttttgctgattatcaagataatggtctgatttcaaaagaagatatggagaaaggaaaagcagtagtagaagctaacagacctagctatctatctattgcataggtgacataatggacgaaaaagaagatttgactattgatgacgaggtaaaagaccctgaggaagtagaacccacagaacctgagacacctgtagagcctgagaagcctgttgaaaagcaaccgttacctaacagcaaagctattgagaatagagataatattgttaaggaattagaaacacaaattcctgaagcaattaactctatggtgtcatatattgatagtctgattgcttctaggtctaagagtgaggagccttctgtcacagtaggtgataatttactatcattagcattaccaaacaactcagtgtacccatcctatgacaaggagctaattattacgtctaccgttgagagatataagaatgcaggttacgatacagcgctcattcctacagaaactcaacaaaaaattccaagttacattattaaattaaaaagagatacaagaaaaatgtaatttagggtagacaaacactaaaatatgtgatatacttagtaagtactaagataaggaggggcgacatgggagacaaagaaaaatttatttcttatgcgactgatttgattgatggcagtgatgttggtggggtaacctttatcgacaagccgttaattgagatggtcatgcagagagaacctaccgaggatgaagtaaaatccatctttaaggagcttgaagccaagtacagtgttgagaactttgctgtacaagtagtcaaaggcactacaggtaaggttttgattatcactaaaattgctgatgttcgagaggacggtgagtagttttggagattaatgtaggaatgtttgacttcgacaagattactattaaagatggtaatggagacagtcacacatacgatttaactgaggagcttagggttaatgagtttaacgtagtaaaagagttctcagagcagtcatctaagtatgtttattgggcatctatcctagaaaaagtgaagatgtacaaagagtctgcggaattaaaagcagaaacatacagagcaagtatttatgaacaggcaaggttagctttggtggacacaggagttaacaaacctacaaaagaacaggtaagcgcacagattctacaagatgagtcttatgttaagctgttagaaggtgtaaatacttatacctatcttgttgggcaactaacgtatgtggttaaagcatttgaacaaagaaaagacatgttaattcagtatggtgctgagttgcgtagagtaaaagactatgaacgtggtatgaactttacaaacagtgcacctaacaactattagaataggagagattaaacaatatgaacttccaacaacaattacaacaacaactaggctcagtaaaaacaggggactttgataacagtaatcgtcccgacaaacaattgaagcaccctaaattgtattttgataaaaatactacaacattgatgcttcgtattttaccccctgtagcacctgataagcaatttgctgagggattccgtagtattttcataaaaacatatacggatgcaggtaaagaggttcctgcttcaatgcaactgtctctagcacctgacatcaactctcctttagagaacgctattaatgattggtctgctagaggtttattaccaaacccattcagtaaaaacggggcacaacaaaaaccatctgctcgtttcttagttaatgcggttcaagtacaactagaccctcagacaggctctttccaatatgagactgaccctgtaacaaaagagctagttgttcacgtagtagagttacctcaatctgcctttgcagaaattggggctaaattgcaagaccctgcgtttgcaccacctcaaggacaagaagttcctcctgaagttgctcaatatagcttcatttcagaaagtaacgcttacgctttgcagattgttaagcctgctaaaaacagtggtaagatgtcttacgatgtgaacgttatgcaatcagttcaattaggggctttacctcaaggatggcaagctttatgcgaagacttagcactacaagctcaaccaacagagcaacacagtgcagacttcgtaaccaactttattggatggtttaatgctcgtagcggtggcggagctccacaagcacaaaacgcttttgggcaacaaccgaacttcggacaacaacctagttttggacagcaaccaaacttcggtcaacctgcacaacaacaagggttccaacaacctgctcaacaacaaggttttggacaacaaccaaacttcggtcaacctgctcaacaagggttccaacaacccgcacagcaaggtttccaacaacagcaacctgcgcaacaaggattccaacaacagcaggctcctgtacaacaaggattccaacagcaagcacctgttcaacaacagcaacctgctcaacaagggttccaacaacaagctcccgttcagcaacaatatacacctcaacaagcggtagcggatgtagctcctgctaatgagcaacaaaatatgcaacaacctgtacaaaatcaagcacctgtacaacaacctgctcaacaagtagagcaaggtgctgagagtgtaccaccacaaccaagtgcaatccctgatattaactccttgttaagttctatgcaaggaagccaagggtaagtaaagcaggggacaacagtcccctgtaatttacgtttactagtaaactgaaataggggactgaatacttttattaggagagatattcagaatggcaagacaaaaacaaagtgaaaagaatgctacaggcgcaactgtagacttatcaacagaaaacttaggactaactaaattctctgatacaagagaagctaagattttagacattattccaacagggttacctaatattgattttatcttaggtggcggactaccttttggacgtatggcagaaatgtatggtaaaaactcaagcggtaaatctactattgcaattcttatgtcaggtatggcacaacgcatgaacgtagatgttgtatgggtagacgtagagggtactactgaagcacaacggttaatcgaatgtggtgtagaccctgttaagaacctctatcatattagacctgatgaacctaaagcaggaactaaaccaaaaccaactgacggtaaatttactgtagaggacgtaggtagcaaagtcattgaagtaattcaagcttctgccaagtcaggtagacgactaattatcatttgggactcagtagcatctactccacctagagcacaattagagggtggtatggaagagaaacaaatgggtctacaatctaaagcaattaccaagtttactactttggttgggcaagagattaccaactcatcaaccctgtttctagcaatcaaccaagctcgggatgttattggtggatacacaccttctatcgagagtgcaggaggtaacgcttttaaacattgggcaactttacgtttagaaatcactaagggttcagctattgcagaacctcacgttaacgcttttggtaaaactgaaaatgttaacagtagctttgaggcaggtattaagattaaaaaatctaaagtatctacccctaatagaaaagaaacttttatcctaaatactgaccacggaatcaacttagctgaaaactattttgagttagcaagtaaaccatctaagtatggattgatgactcgtagtggagcttactaccaatatgtaactgaaaatggtgagcaactatctatgtataaaaacgactggattgcattcctagaatctcctgaaggtcaagctgtgcgttctgagcttgttcagcgtatgtatatgataactttccctaactggtacgcaccgttagacaacgaagctatcaatattgagttaaatcctgactttacaggcttacgtgctcgttacgaggctaagaagaactcagaaacacaacctgtagtaaacgctgaataacaacgacataaggaggaaaacatgagtagaaaacaaccactaagtcaagtagtagatgcgatgaattattatagtagcagacgggaatctgctactaattctcgcaaagcccctacctcattcggagaaatccgtcaaatgtttcaaaatgcaatggacacaggcacagaggtaatcattgaaagctcagagattaataacatgaactctgttagattagtgattgactatgtgggggatagatggtgtaagggttataaagaacaacgctactacaatgaaatcattcggatacctcacacaattagttatgctgaagtttatgtctctacccacgaagtagacagaactaaagcaaaaactaaattgttcttccgaggagataacccttttgtctagagatatagataaagagcaagagttaatcagaacaggaaacagatttgtaacagaagtgggtagctcaacaggtgtgtttcctcgtgatgtagatactttgtttattagatatgaaaacctgaggaacaagatatatagccagtatagctcgatgtatagcgacagtgttactaaaagtgaactgcgtagctatattgatgaagagtttgttaagctatgtaaggagtatgaaatcaacggagaagttgacttcccttattatattaaaacaaaacttacagctagagtcaaaggaactttcaactcaggtactattcgtactagaaaacgtgaacctttgggtgcaaccgagggtgaagttgaaaacatgttggatgacaatgtttcaccatatgctactgttggtttccaagagctagtagatagcctcactgagggcgtttctttaagccctatggagcaggagatactatcagtaatggtaacaggtgagtggacagtaaaacagcttgtagctgataatacggctaaatacgatgtgtctaaaaagcaagtacaagaaacaattgctgacattaaagagctagtagcacataagttaggttatcctagataacctagctttttttgtttcgagtgctatattagaattagaaaaaggataggaggtaacaaaaagatatgaataacacaggaacagaccctaaaacaatggctatcgttcggctagtagctatgactatctcatgggtaagtttacttttaactagccaattcggatgggaaccatttcctttcacagatgagcaagttaatatgggaattacacttgtgctaactataggtactagtatttggagttggtataaaaacaaccctgttacacattatggtgtaaaaaaaagaagaaaaaggtctagctaaggtcggtacaagacaagagtttaaagaaaaacaaaaagaggataatcaataagaaagcgaggattgagtaacatggcaacagttaaaaaatttattgacttgattgaaggttcagaccctatcgagttagacggagtttacttatgtgcaaccactgaaagagatggattcacagaaactcaccaaggaaactactggtatttagtagaaaaagaaggagaagactacaaagttactcctagcaactataacaaagacttagatgcgtttgagaaaattgatgcacctatcatcataacagaagatgactttgtgttttacgttgtaggtacaaacagagatagttatactttcccaatcttgaagaaagaagaagttacttcagcagaggttcttgaaaaacaagtattgcaagcattcttggcgtttatcaaagatagattccgtttcggtgtttataatatctttgtagtaacagaaccaactgtagttacaccctgatgactccccgtggatgtcgggggtatcggagacttctctataggggagtatactatacaataaaacaaggagtgataacaaatggcaacacaagacgaactatacactaagttttctacaggaaagaaacctaacggtgatgactttaaagagttaatcgactttagaggagccgatggtgctaaaggataaaagggtgacactggtgctgttggagctaaaggtgacaagggcgataaaggtgacactggtgcaacaggtgctaaaggagacaaaggtgatgcaggagctacaggagctaagggtgacaaaggtgatgcaggggcaaaaggtgcttctgttaaatcaatagcattcacaacaactgacggtaaagtaactggtggtacggctacacttacagacaacacaactgtaccagttacagtaaccgaatcctaataaaagaagaagacaacttaaatagttgtcttttttttattgacaaagattagaataggtgttatactctaagagtaataaaaatataaaaataggaggtactgtatgattcaacttattacacgaggtaatagtcaggggtacctagcttcgtatgtgcttcaatcattgttttcagataaagaaatacacacagtgattgacaactcatacacattgtcaggtcaagactttaaatatgaccctgaggcagaagctgtaattatcttagggttcccatataagcctaatcaggaagttatgactaagaaagctttagagaatgtagctaaccccttcacattggtgttgcacatatgtagctttggtgaccgtatggagtttcaatatgtaaactctatcgtagatgaagtgaaaagccctgtatctgtaatgcttgatttcttgatgcaaggacagtctgatgactttatcagcaaagttgttccgttaaagagtcaagatatagaccgagtgcgttcgtatgtagaccttggggatgattaccatagatacgatttctctatcaaacgaacagtagacccgataactttcaatgactttcttaatttctatggagagttcacttatagcattattgggggaaaagactttggctgagttattagaatcccatagaactgagttcaaagctcttaatattaaaaagagagaactatatgaaacgcaggttacagctagctgagataaagttagcaggtaactatttagttgcgattttatatgcagaggagtatcctaatgagatagctcactggttaatcaatcaatatggtaaagcaggaatgcaaaaaatagttgtcttagtcggagataagactaaaggagatgacatgttcagagttcgtactaaaggagctcatgcaggggaagtagctaagtaccttaataacggaaatggaaaagaaaacgtaggtacagtattcctcggcaatgcaagtaagcatacggctgaggttgtcataaatatgctatcaagtttaccataaccactaaaatgtggtataatgatattgaggcaaatattataaacattaggagtgtacaaatttgacagacaaaaactataaatatgagcgtgacgagctacaagatattagcgttatggaaagtatcattacaggatacatccttagaaactataacaaaattcaggtaggtaccttcaataagatagctactacattaggcttagacaaacgaagtaaagacagcattgttgctttgcttgagcatatccatgcagaccctgcacttaaagagtggcacagccttgcaattgaggggcaagttgatgtagaagacttagagcagtatacttcttttgatgaggatgaacctgttaagcctatcgaagaaaaaaggaatccaacaaacagttgctccttacattttagctaatgaggaagttttagctaacaatcgtgagtttcgggaagtacaaagaacaggtgcacatgttgaacggttgtttaatgggttgaaatcctatttagcagacgagttcaccaaaaatgacattgctactccacaatatattagacctaaaggaacagacacatttgcagaaaaagagttagtactaggtctatcagattggcatgtaggagctcttgtaacgaatcctgatacaggagggtacgactttaacaagctaacgaatagagtgtctgagcttgctgtagaggctgttaatacagctcatgcgcagggtattaaccatatccacgcatactttattggggacttgattgagcatatcaatatgcgtaacgtcaaccaagcgtttgaagctgaatttcctgccacagaacagattgctaaaggtattcggttaatctatgatgtactagtatatctttctagtgaagtacaacaagtaacctttggtattgttgggggtaaccatgaccgattccaaggcaataaaaatgataaagtgtttaatgataacgtagcatacttaacgttagatatgctattcttctttaaagacttaggaacattacctagcaatatcactttgattgataaccgagaagacgtgtacagcttcgttgatgaggttgcaggaaaaacaattaaagtagttcatggggacatggaagctaaacgagaggacgttaagattcgtaaacacattcgtagagacgatattgactacttaatcatgggtcatatccacaccactcgaataattcaggaagactattctagattccacatttatgtaggttctccaatgggagcaaataactatagctctgaaaacaacttacctacaacatcaccgtcacaatttatcttagtcttagataaactgaaagaccgaccaatgtttagcccgattatcttataagggtgttgacaactaacctctagtgtgctatactattagtatattagaggtttttatttttagagaggagatactgaatgaaaaagcagattaaagataaagcatctttacgagcattcacacaatctatcggtaaaatagtgccagtaaaagaggtatttatgagtgggggagttatttatgtcctcaattcagatgatggaactatttgtagactaggtattggggagcaaccctactatgaatatattagctactacaacttaccaaaagagagtcagttagctttacaagtattcttgaataagtatgctatctcagaaaacatgaaggatttggctatcacagttaagttttttaaccctgattactccatgaatgagtcttacgagtgtagtcattgtggtagagaactgaatgtaacaatggctcagtcttacgatggctacaatgatatgcctatatgtattagttgtatggatgctctgccaagtctagataaaaaattggcacaagaaatgaataactacgatttagtcactgttcgtgttgatttaaagtcagcagaaactacgtatgttgatgtaaaggtcagtaaagaagtagataatattgttatcaggtcaatgcttcttgtagcagaataccttatgactagtactgactttgaagtggagaacttgaccattgatgactatacaacgttaggtcgtgacccaaaaactaagattaaatgtcgaggagagtacgtagtaaaacctctacaggaagtatttgcgtatactaatgtagaagagattggtataatcggatacccgatgatttgggagcaggtggacaaatgattacaagaaaaacagtcgaatatgtattggctcttagtgagttaaaacataaattccctattgggtctacaatggtatatcaagataaagaatggacagtagtagggcacggaacgcctactccaagcacagcatttgctagctttccatttgttattattgaaagagaggatgataagtagatgggtacagaagttattgtagtaatggttgtatttatggtagctcaagcagttcgagctatctacgcttctttaaagaaagagcgggttatggttagagaagggggttctcccttacctacaagtgtatgggtatttttaggtattgaagttctgattgctcctttggtagtatggctaatggcactattactatctcctatcgttgcattgctacctacaaatatggtatggttgagcattatcgtagccatcatttatgcagtagcggttatggtaagccgattcgttagtgtaactgttgcttgggttgttaaaattattatggttcgtaagtacaaaaaagaaattaaagacaaacaagagcaggaagtagctaactatcttagagagcaagtgcttaacaaagagtaactatgctatatttatgtataggagtgataatttatggatatggatttacaagcttcgttctcggagccaatattaagtttacccacaaagattaagacaggtgtattatacaaggatgtacctgtcttagacgggatagcaaatccaattacgggagaagttataacaaacaagcaggctatttaccttattgagcacgtaatagaccccaacagttttgatgttgctattgtgtactcagtacaagctaagtcagaccctcctgtaaaggcatttgaatctaagaaagccgtagtcccttacagacagtctactacactaggttccttagctcaaactaagggaataaaacaagagcgtagctacattgaggaaaaaccgccactatttgtaacacctatcatagaaggtttggacacctttacaggagaaccttgtttaggtttcttagaaagagagcctgataagtttactgcaagcgggtctgtaatagaaggcaaaccaacaaatgtgtttgtatcattagactcaatagaatggttagatacaagagtgcctacacgagacttaattgcagatgtagtagcaattaaggatgtgtggtttaacttatgaccgaagataagtttagagaagccgacatagtggctctcatcaaagaaatggagcacatgtttggggatattggggacagtgctctaatctttgagaaggctattatgcaacagaaaactattatggattgtatgatatgcacacagaataaaggcgttatcggcattgagattaagacagaacgagatagtacacaacgactaaataaacaattatcggactatagtaaagtttgtgactatgtatatgttatgtgccatgattctcatgttggtaaagtggagaaaatactaaaagccaagaactataatcatgtaggtattattgcttacatacaaatagggttaacaccttgggtaggtatttacaaagaggcaactaagtctcctgttaaggacgtataccacacacttaatatattgtggcgtaaggacttatctacaatgttggggacgtttaaacatattactcctagaatagaagaagcacaccctgaacttcaaggggctagttatagcaaccgaagtggtggtctaagtggagtagtcaatcaaccgctagtcagtcagaatgcacgtaaacctgtgcttattaatgctcttatttcaagattagggcaggaagaggctaacaaggtattctgtgatgtaatgattaacaacagaaatcatcctgaaaagtcaattaagatagagcattttaacccaaaggaggggatataatggcatatgtagttcaaatagttcctacaggagcagatagacaaacttactctcttaaagagggtaggtgcattaaagctcatgacctagatttacatttagaatggttatcagagcaagggtatgatagtgagagtctaacagtagagcctgctaagatggatgagtatagcaaggacaaagttaaaggttcaggttgggtcttagagctagaaaatatagatgggtttattattactaaaaagtcataaaaagggggaaacacaatgaatgagatgaaacatgtattaacaggtgctgaggttgaaattggggacacaataacacttccttcgattactgaggcagtatttattattgtggatgaccctaagagaggtaagtgcttgcatacaaagtcaggcacatttgaagcgtttgttagcttagccgatgctgaacactatgggatggttcgggtaaatggtaagtagcggacgtaaatatggtgacataagtaaccttatggggaatttacttggtatgggtgatggtagtcaagcatacaaatctcaggtaaactcccctaaagggtattactatgtagaatttaataaaaaatatcgaggtgtatctgaaaaggacatagctttaaaagagaagtatgctttagaacttgtatccaagcatataggaagccatcaagattttattagattgacacctaagaaagaaaatttaactgaaactagccttgatactgtgtactatgtacatagaggtaaagccatcattggcaaaatttcaatcagtgtgcggagatacggtaacttaaacgagctcatttttatttatcagaagaaattcctacgttcgaaaaatacaggcggaggaactaaaagagcaaactctagtagtcttgctaaagctagagctaacaaacgtaaaagtaaccgtaatagaaaaccaacacaaaaaagaactttataggagagtgtaagtatgttaacaatgaaacataaacaaagctcattgaactacctagctaaagcaattaaagcttctagtggaggtggtcatgtattcagaaatgatgaattatctttggtggggttagcttactccacagatattctagaagaggaagtattatgccatactgcattaaataatgtgatattccaaggagacggaatgactgctaccataacattaaaaccattacctagtcaagtacccatgttaaaaacactggaagaaagttttgctttaattggtgggggtgctttcattgatgatgttaaagtcatggaacctgtcttctccactccactagacgtagatttgctaatgggtaactctatgttttcaaatatccaagactacaatatggaattgcatttagagggggctgacgtgtccttcatggagactaagttcgcaggagaggtattataccaattcgtaattgaatcgtctctagaggctactacgggggatattaagcaacatctaacactattgttcaagcctaaggtttatgacaatgaaaacttgtttagtactctgttagtcttgaacaaagatggagctccaaagcctaaacttgataaacgagatacaaaaaaattgcttgatattatcatggagcctaatcttacaggactgctattaggtagtgtaatgttcaaacctcagtataattcgattactgctgttgtataccctctaaatgctaacatgcagattgccgaggcagaaaattcttatcatgtgattgcagacacaggaaccattatcgtaaacaaaaaagatattaagtattccacagttaaaaaaagtgtctcaaggaaaatatctattgtctatctatgtatctgacggggtacttagattatctctaggataaacttgtaaaaagatgtgaacttcttgttgacatctttttttatttgtgctatagttaattagaacttaaaaacaaaggagaaatgaactatgaattttgattttacaggacatgcagatgcaacactgaaagatactgttaatttagctgtcaaacaattagaggagtcagacactccacgactatacttcccatgcaaacgtgtaggtgacgaagtgaacgatttgcagtatcattactttggtcgatactacgaagaagacgagattgtgacaagtagaagagggaatatcattagtgcaggtgccacgttcagtatgaagaacttgacggaaaagcctgagaattgggacgagacttggggagctttttacattgatgaaaaagacaatacagggtttaaaatttatattgtagttcctcatgtaggagtaactgactatactatctcttatattgaatacagcattgtaaaccgagtattcaaatatactagaaacttcaaagaattaaaacgtagttacaaaaacattcaagaagcgttctcagaagtttcttacgcacttaagattaaaaatatcttgttcgttttgtcaccaagagcaacaccgatgttctactatgacatgtacacgacaatggctaccatgaataaagaagtggcttcctacattggtaggttcttagagcgactacttcaatattcttggattgaggttctttacaagtcagggctacctagaactacagtcaaagaatatatgtcagactttagttacaatgagcgtaattatctagatactagccaaacgagtgcacgtatgatgatggggttaccaaaaccattatggaaaatggcattgcgtggggagcttgatgcaaaacaactacaaagtttttctagagaagctaagacctataaagagtatgtagaaaatgtgaaacgtggagagttttcagagtatttccacatggatagctttgactattggttagaaagccgactccctgaggtgaaagcttttgattgggaagacatagatagagatgttcgtagacggttagaatggagaacagacagctctgattactattctatgctacgtgaataccgagaagaaaatagccgtatcatgactgataatattaaggctatgagtcctaaggtgaaagactactaccaaaaactatatgataaagaagtgcaggtacaaagtaacaaggctaaagaaactatttcgaacaacattaaagactacgatattggttacaagttatttatgcaggttatggatattactaaatctctaaacaaagagtatggagtaaaccacacagcccgagttgtaaatggtgagggtggttggttaatatggaagaaggaagatacttccgctattgcaatccatttaaaacggggatttgaccttaagagagttgttggttatatttactatcaatgccctcttgaccaagggttcaaccttcgaggtactaaaagttattcgtctcatgctttctctgatacggggaatactacgtatcgtgattatcttgacatgatttctagatactcaacaacctatgacaagtacccacgttatcttaagaccgctcatgacattgctgtagctaacgtaaatctgactaaagactcagactttgtagccaagttagagagccaaacagctaaaatatctgactacgaaagtgttaagattagaggggcaaaatacaaaatcattgtacctcgaacagttgacgacttcctgtcagaaggttcagacatgggtaactgtgtagctagctatgcgcattcagtggtttcaggagctaaacaagtcatctttatgcgagatattgccaagcctaataaagcattgattaacattgagattaggaatgggactattgttcaagcagaacaacggtttaatcaagctgtagatgaaaaccacaagcagtttattgatgcctttgctgagaaagtagggctaggtaacaacgtttggggtagataatgaagggagaaattatggctaagactacaaatattggtagtcagctacgatacaatgcagaagaggatgagtatactagaaaatggttgagtttgctagagtactacaatgcgttcggggttcctgtaccccgatactcttctgattttagaacagataaatctgtatgtaagtggtgtggaaaacctttagagggtaataaacataatttttgttctaaagagtgtgctgacgactattcatggcgtgtaacggagagacgtacactacctgcgctcccacaccgagttgcattgagagacaacttcacttgtatctattgtggtaaagatgtagcatctacgaatcgacacggtatgcggttgcctgtaagctcaggtgactgtagctgtgaccatctaatacctgtagctagaggaggtactgaccatattagtaatctaggttgtgcctgcaaagattgtaattttaaaaaaggggtattgacaatagatgagttctatgttaaactagaggaagaaagattaaaggaggaaaataaatgaataactatggaattttgttatttacagatgacgagagtgacaaggattttcagtttatgacaagagatacttataaggatttagctgaagcaagagaggtacttaacagtcttaaggatgacaaccaaggaggtatgattgtagagctagttcctagagagtatcttcatgtcgtaccagttaaagatagtcttaaggaggaaaataaatgattacgaattttcaagcagtgctaattttaattgccttttggttattatgctctacagttgctcaggtgtctaaagaccgtttagataaacatgtagctaagaaatacacggaagcaagcaagtctcaggaggagcctcttaaaaagggtttagtagcagtagagtccatgtcagaaaatgacattattaatagtgctaaaataaaatacaacaaagatatgcaggacatgcgagatagtatcgaaggtaacgtgtacttactgcactactatgattctgtagacacagcattgaagaatgttagtatggcaacccgaggcactgaggtatatgtagacaacttagcaaaattaaaacactttattagtattgaggaagggagcaaaacaaaatgattagagcaattgtagtgcaacgaacaggagtaaatccccaagtctttaaaggcttatttaaagaacatggtcggtacttagtatatcgagggaaatcaggtaacttagttatcacaactgactatggtatggcatttcctgtagaaactagagatactcgtaaaaagttacgggaaggtaatgtatcgtttttaccaagtttggatgacatgacaccttacttctctcctgaatctgacttacatgagagtcaggctagagatggtaaagggttccgaattaagtactttgactcatatacagacttatataagcacgcacgtatcaatactagaagtggggtgcctaagcaggtcaatcctttaggcaaattgtacggagaggttaataaaaagttcagtttgttaaaatcaagcattaaaacagttgaccctctagagttggtctcttataacagtagtaacactattgctgattttaaggtagtagaccaactagtaacgcacttgtctagcttagggaactatgttaagaccttggcgcaaaaataccctgaaatcagcttggttgacattacagatgttacactcactgcattttctaagtatgttttagacttaggggtgtacgatgctaacccttacagcactaaaatttcaatgcactctgcaccttcagttatgtaccctacagatgggtctaaagaggtggagaaagctactgattggactccatcacctgcggacttaccttttccttttggatttccgccattagatgcagggcaaaaggatacgcatgatattactaaaattatccgttctttaggtaaacaaacaaagttttagatgcaaaaaaggtcacaacttagtaaggttttatggggtagttgaaacgaattatttcatcttattaataatgacctacaaatgtttcatgttacacaccttagtataccctagaaaagtcctactatgtagtgtgacttttctaggattttaaggcaacatgaaataatgtgaaaactcgtgctatattataagtgaaatggtaattgcttaggcttttaccctgatttcatatactaatagagcaaaaggagtttgacatctgaaatgactgataagaagaaaccaacaagaaaaaaaacaggctagcaaaggttctgttttgttacaactccataataataagttgctgtcatctaaggttaatgaggctttagatactaataagacatatgacgagattatggaactatgtgctgaatacgagttcgagataagtaaagcaaccttatcaagatacaaagataaacgtgaggaagctattaaaaaaggaatacctttagaagaagttctagacggacgtgttaaatctaaagtagttagtatctcaggtaaagaagttaaaagccctgtagagactagacacgataagcatgaaaaagaaatgtctgctcaagatacattatatagtgatattgagctacttgatgacattatccaaaaagggtttaatggtatgcagtacgtatcagtagtagaccctcaaatagcgatgaaggctattgagcttaagaaaaagattacaggtgacagcctacaaggaatgagcgtagcagggcttaaagagttaaatcttagaaacctagccttacaaaactcattaacggaagtcctgtttaaatatattcctgaggataaacatgaggaagtaattgaatacattgaccaagtagaggaagagttttacaacaatctagaccttacagaagaagaccgtagattaaacgaagctctaaaaaacactactaagctaggaggatagcagatggtatggaaacaattaagctataaaaagctttcattacaagaaacattagacaaactaatggcggggagtacattagtggttcgtggagtagagtctacgaataaaggggatattctagtacgcttagacccccgagcagtacctgtaactcaaatatcttatgatgtaggtcgagatgaaaagagtgaatactttaaaccttattgggtggtgtacgatattccatttaacttctttgttacacgggatgtattagagttcaccgatgattacaggctgtacaaccctaaatttaaagtaggggatactgtaagatacttctatgaggatggtgcaggcaacgcagaagtagatactgctatcgttaaagctatctttgtagatgaggacgagttattaggaacacgtaagttctactataatctcagtcgggttgaatacaacatcgaagaagctaacttaacgaaattataataaaaagaaaaaaggtcttgacaagttcagacctttttgttatacttagagtataaatttaaggaggtaccgcaatgattgaagagactgataacgtaaagaaagttgtagaggataagggtgaggtaaaacgagcagaggttagttcctttgtagatatggcaaactctgtcttagataaaactcctgagcttaaggatattcctacagaagagaatattaaaaagtcacaggaagcttggaacaaacaatatggtggcacggagtatgaagagaaaaaagctagtatggctgttgagtccattgcaggtcataaagtgaagcgtgaaatcccttctgaggacttcagtaaatatcctcatctgattcgtgggattgaagcttatgggtatgaattggaagagtctcgtatgtttgagatggaagaagggttctttgcagttactgaccttgcaggtaatgacatgaacaaacctaaggcgttagcttctagtggttatgtcgttgaaactgtaggcgtaggtagcgctgttgacaaagaaaccttagaagtgctagtagactcaggttttggtattgtggttgaaaagttagatacactaattgaatctcttgaagagctatctgttaagatggataacttaggttttaccgaaacagaacaagcgacctttaaagactttgttgagaatatctctaaaaaggtaaatcaacgaaaccacaagaaagcttagcaaacggttctgtaacagttaacaatggtgaagtcggggtaatcgtacacactacaggtaagcgcacaggtaacgattttacctcccttgttattgacgatgaaattattgtagaggatgaagagtctgcggatgaggtcgaaacaaaagagcagtcgattctagagtttactgaacagaaagttattgaagattataagaatggaatgtctactcacgatattctagaaaaatatgatttcagtgcaggtcgtttgtactctattctaaataagcataaagtgccgtacagaacgacaggaggctctacagggctcgcaggagtccaagtagctgagtatttatcagatgacaacaaacgcaatcagttgattcgagcctatacagacaagaagatgactctcaaagacatttatctagcctttaacattactaagaatgggttgttctatatcctagatacttataatgtgccaagacgtatgccttctcgtacattgaacacgattaagtagatgaagatgaataaaagagtgtacccctagtgacgttattagtcatcgggggtatgataatcggattcgtattaggctatacaataaatgtagaccgtcaggttgaacgagaagtcaatttcagactggaaaggatgctgtcgaatgaagaatacccgaacaaataaaaaaggtgttggttggtatctactaaaggagaccttaaaggtagttggggagtttctactctatgctgtcctttatataggtgctataatagttatgggttttatatactattgggcagtaactatctcttgggttggtacaactattcttgtaggtgtaggtttgtttcttgcattaggagtaatagcaatgataatcagtgtgatagactggttcaaaatgaaatataaggaatattcgaagtagctagattaattagctacttttttttgttttactgttgacatatcgtaggtggggtggtattataaatatatcaagtagctcaccactaaaaacaatttaaaaaaattaataaaaagtgttgacaaataaaaagctacgtggtattataaatatatcaagaagacaacggagggaattaattatgaaaaaacgagcaggtaaaggtaaatcaaacttagtatgtggggcatgtcgggatgtagcaccaatctttcgaccatctatgcgaggacgtgaagtaggacatatcaaacatatgtattgtgccaaatgtggagttgaacgaccattcattgaacacacagcagataaaattgaaacaatgtgggcattggaagctatcgactcatctaaagagctagggttgctaactcgtatgtacaacagtaacacaggagagtttttgacacaagaggaacaaacagaaatgttaattggcatttgtaaagagttggaagtagaaggattggaatggaaagtagacttagtatgtcggatgttggttgaccgtggctatgtagtgcacgtattacaagattttcgaccaaatcgaaaataagtgttgacaacaaaaaagatacgtggtactattaaataaatcaaataaataaaattattattggaggaagaatcacatgactaaaattactaaagagactcaaaaaatggttaacaaggcagaaagaacacaaaagaaaattgaaaaacttaacacacaattgcaagatattgttaatcaaattattgtagaagttgatgtacaaaaaacacaagtagttaacactgctaagttcctatcagataatgagcgttactaccgagatactttacacatgattgaattaggtgaaaatttaactgtagctgaccaacaacgactgtttgcacaattgcaagatgctgtacacgcaagacgactaggtaaagatttactgtttagcttaggtatggacattcaggaagtaactaacgtatacaatcaaggttcaaatgctgttacgaatattccacataaagatattcctgtagtagaagctaaccgtagactaaagagcacagcagggcagtttaaatctcaaatccaagggttgaatacaagtaaggacttcaaactaagatttagaacaacaagtgacaatcgtgcatacctactacgttctagagaaaatacacctcaacgtaaaattattgttaagaacttagaccaaacaaaattaattggtaaaaaatacagtgctgtaaagcaagagatggaggaaatgaatggaaacattagtaattaatatgggagaggcaatcaaacaagctcgaaaagctaaaaagatttctcaatcagagcttgctagccgtgcaggggtgacacaaacttatgtgtcattccttgaaaaaggcacaacattcccacaaaaagataaattagttgccatttgtaacgtgttagacttggaaattgtttttgaacttaagccaaagaaataggaggtgtactgatgaacaagtaccaacatattgtagatactataaaagacaagacagactttgagttagagttactaatagatgggctgatttgtcacgcaaactatttacaatcaatacctaattatcaaggtatgaaagaatgggctcatgcgatgcaagttgttgagattattggaatagcattatcagacagagaggaattacgttatgactacttacgatactaaaaaaataggtaaaattaaatattatcactttcccaaggaaaacagcttttcttttcctaaagatatgtacaagtggtgggttaatcagatggagagatacgttaatgagttcttaagtgttacttatggtaagatgccacgtattcatgtaactatcaataacagattgactaccacacacgcttggtttgttacctactataaaagagcgtgcccaccgcacattgagatgagctctaggatgctcaaaggtgcaatgttgttaacaggtacccctgatgaagaaggtgcttacaaggcaattgagagtactttacgacatgaagctattcattatgccttgtatcatttaaggctaccacattcagatggatatgacacatttgagaaagacttgtttattacagggacaggagctagtggagccactaatgagagttctgtatacaaaagtattattcctgcgactttgactacaggctacttagctatttgccctgtttgtggtaaagagaatgccaataggacaacaggaaggtatcgttgtgctagctgtatgaaagaaggtaagaaacacatttatactgctaagaaagaacttatggttggaattgagtataacaaagagagaggacgaaaagaatatgatggaaactattcaggagaagttaaactcccacttaaaacaattaacgggcttgagagataccctcaatgagaacaatgtatatgcgtatgctgaaatattaaaaggtatggaagctgatttaaaagacctgagtgtggtagtacgattacctcaacttacagagtacctaacaatagtcaatcagttaaaacctatcttagaggcttatggtgccattttaactaatgaagaggtatttaccctagctaagcaacaagacagcttagacgacatgctagccctgctagacactgttgtggaggatgaccctcaagagttttattattatgaccctaaaagaataattgacatcgaggagtatccttaccaagtagctgatagagaaattattttcttgacagaagcaccattaggttatacaatggggacacttattaaattgatggaggacttaaactatgtataatttgtatcacaataaagaaaaaggtgagttaaaactcattaaagttagcagtagtaacagaaagttgcatactacgtacaaagcacagccttcatattttaatgattgctactacgtatgtatggagcgtaaacctttaaaagagctagcaattagcattaaggagcaatggttgaaggaagctaaagaacgagttgaaatgctagaaaatatgaaggtctagaaaaaatttaaaaaagttaataaaaggggttgactttatcagccccttactatatactaggtttataaacaagaaggagatgttaaatatgaacacattagaagcaattttaacaagtagtgagcaccaaggttcagttttagaacatgtaaaacacgagttgcaatttgacgacagaaaaaagttgaagctttttaaatcttggttagaagactacggtaccgaagaggatgaaaagtactttgacggaatgactgatgatgaaatcttattgtatatggaacttgatgacatagttgaccaagtagctgacagtacaaacccaaccgaacttggtgattggttaggcattgactggacaggcttagcagaatcttacggactataaggaggttattagtttgaatagaaagatgactacaaacattagaataagtacaactaatatgaggtttccaaaacttagaaatagaagataccgaaacaaaaagcaaatacctattatagtacctaagtattcagagagtcaagtacaaagagattctgtctcacacatattaaaaacacttactaaggaggaaaaatgatgaaaacatattggactagtgaaggtaaatatcaaaaagaatatcgggaactaatggataagaatggggtagattggggctacacagagagccctattatgaacatgttaattgcaggcaacaaaatctattatgacttttataataatgggggtatgaacttaccttggtcgggttacagtgaagactacggctatttaggggagttagtagctaaaatccaagaaggttgtcaagaagttcaagacacaccttcacccgatatgtataacctaggcggtatttacgttgaaggtgacttagaaaaactataccatacattagagaaaacagatatggaaaacaactatgttaacctagaaaaagtcatggatgctattattttgctagcagaagcttatatcaaaccgtttcctatctatactttgtattttgacttcgataatgagactatctcaagaactattaaattgaagcagactattacttttggtgagaaatctgaaatggaagcttggtatgaccatcgggtgaactcattcaactacacagttgtaaattcagaagaagaacaaaagcataaagctcatattgtaaaggaaactcggttggcttcataccgagaggttattgctaacttaggagagcgccaacaaacaatcgttcagaaattcaaagagtcaggtaagtattacacggctagagagcttgcacaagcattgtacgatgaaggtaagcttatcacaaatgaccgtaacatggtacaacctcgattgacagaacttgtgaaggcaaaagttgttaaagtagttggcaagaaaaaagatgtattaatgaatcgtatggttgctaagtattcattagtagataaatactatgaaatttaagtgttgacttttaaaaataaatagtgtatactatgtatatagtaaagaaaggggaaattaattatgaaacagtatcgtgtttacaactatgttaacttaggttcaggagaggttcattacattcctgtacagaaccctgcggaaggtattgcagttattgatgcgttagcaaactatcagcttactttagatgaaagcattgtatcttctaacgcttttggtcttgaagagtatgacgagaccgaacaagaatggtttgattggatggatgatgacggattccaagaagacgactaccgaaacgatgagcaagttaaacgtgcagacttatggaaaatgtactaccgaacaccaacaggattcgagggtttacacctagaatcaaatggttttgaaggagttaccactaatgaagaatagtaagttacagcgtatgtataatgggctgaaaggtggttgggcagtattgcctgacacacctacaaagcctgatgaagagtctaagcagacgtatcatggtagctttatggagtatgtgagagtgtttgggggtaaaatgttagcagaaggtacgactttagctagtgaccctgacagcacaaacaacctcagtcagaagctatcagatgcagtagcaagtgggtatgttactatcaagaatggtaaatttattaaagtagctgacacacctacatgggtacaccctgatttgagagttaaggagggataatatgatacaagcatatcgaatacatgtgcttatcaaattgcccgaaggtgttagatatttaggctatcactttgcagagtttactagggcactcaaccctagaacattagattgggagttactgtctagtcttataactgattactataacagtttggagcctatacatgcgtactctattgagcctgtatcaactaaggacatcttaggttattgctcgtattatcgttaccaatcagaactactagaaagcggaacagtaccaccacaaaagattactgtaccgttgaacacagcaagcaacatgcaactaattgacttataaagggggaaacatgatggaaaagaaacagacaacacgttcagaagttgatgcgtatatcaaacaagaagaccaaaaacgtttagtatggtcattagttacagccttaattgctaccgtaatctttgggctacttatcggtattattacatttgtaggtacctatgtgctgattttgaagcaggataaggaagaggaagaacgcattgcacgagagtatgacattgacgaaaatgcttaggataaaactttaggataggataaaactttaggataggataaaactttaggataggataaaactttaggataggataaaactttaggataggataaaactttaggataggataggtaccttaggataggatggataccttaggataagcaataacaaacaacatttaagggggaattaatgtgaaaatcacaatcactacagagttgcaagtaactgagatggagttggaagactatcttcgagttaagttctctagagctaaagtaggggacattattcgtatcaagtcaaagaagaaagataagtatgactatcttgtactcagcaagcgtaatgactatggggagtcttcacatagctactacggtaagtctcaacgttcatacagaacttatcatgtagtaaacctaagcacaggttacctatggcgtgcaggtggggaagacctaacagattcattcactgaatggtttactcacaatgacagcttaacaatcacagagcttgatgttgtagactctagtgagctaacgattacaagttttaaataaaaattagcccttaagggcttttttattttatttgatactaggttaacaggagatggtacaactgctaggcacaattaaccaagtagctgacagtgaaaattagtcaagtagctcaggacaaaaatccaccaagtagctgaccactaaaaatccgctaagtagctcaccacgaaaatccgctaagtagctgacagtgaaaatccaccaagtagcccacgcactaagcccgccaccaccaaaatagcatacctgccgtatattgtcaaggggtcaattttcacgctttttcttgtattatatagtagaaaaaaataatttaaaaaagttaatcaaaagtgttgacaatatgaaatagctttgatatagtatagacaacaaaagaaaaggacgtgctaaacatggaaaacaaagcaatacaatacgccgaacgttacggcatacttgactatactataaaaggttcttacatgatttattatgcttcttatccatcaagtggacaagacaaacgaacaacttataaagttactataaaccttgagacaaacgaggaaaaaagggaacaactaaaaaggtactataaaaaaggtgaaataaatttatatttatagttgacaactaaaaaaatacatgctatactatggatatagtaaagaaacaaaacaaaaaaaaagaaaaggacgtgtcaaacatgaacaacaaacaattatacattaaaaaaacaaacggggtaaacgggggcgtttcttcttagcagtagaccacacggcaaacacttttgtaacaggtaagacaaacggaacggcggtttcttatagtaagattgataacacggtaaaattaaacactgaaagagaaataaaagaacaaagagatttttatgaagcacggggctataaacaagtttcaggggaaacttttaataaaacaatttaaaaaacttaataaaaggggttgacaaacaaaaccccttttgttatactaggtatataaataagaaaaggaagtgctaaacatgaaacaaacaaaaaaagaaattttaattaatggtattttagaagcttgtaacaaggtagcaactgagacactaacagacaaggaaaaagacacactaaaacagtttacagaaaatcggttacatttacacggtagaagcggttatttgttttatacggtacaatggtttaaacgtgtatacattcatacaaattttggtggggctttggagctgatagcggaatatgtgcttaaatgtaatcacaagacaacgaaaacaaactatatcagttatgaagctatttaaaaaaattaataaaaagtgttgacaagctgaaaaggctatgctatactatgtatatactaaaagaaaaggaagtgctaaacatgaatgaaatgagagaccatttaaaagttagagatatgaaggcggtggcggtgtacggattgacaaacacggcaagcattgaaattttaaagattgatgaacaagaagaacgggtatactattgtttgcgatgtggtgaacgggggcgggtatgcttcagtaaactaaactcaaatagtgacggttcactatactttattaatcgggtatggggtacacaagtaagaataagacttgatgagtgtttaagagtagcttaaaaataatttaaaaaagttaataaaaggggttgacaattaaaaccccttttgttatacttagtacataataagaaaaggacgtgtaaacatatgaaattttttgattggattctatttgtatcttttattcttttattggtggcgttaggtgtgttttttggggcgctagtggttagcttagtgcaaaacttaggcatttgggacgttagggcgttagggctttcgggggttattatttgggcttatattgccttacttgctgagatttgggcaatcggtacaggaaagaaaaagttataaaaaaagttaataaaaggggttgactttaaacccctttaatgctatactatgtatatactaaaagaaaaggaagtgctaaacatgacaaaactaatagcagacaaagaacaaaaaggaaatcgctttgatgaacgttacaaaatatgtagactttgaacattataaacaagattgggaagacttagaaagtgcaaaagaagactttgccgacaagctagaaaatggctttattcaagaaattacactaggcacatacaacggggcacttgatatttttacacctcgtaaaattgatgacagccacattttagatgcaattcttgccgagttgcatgagactgatagctatgctatgcttgatgagatagaagaaactgaaaacatgacacaagcggactatatcagggcatacagtgaattatatactattttcgttattggtgacaaaatttatattgatagagattaaaaaaagttaataaaaggggttgacaatcaaaaccccttttgttacaataaaaagagtaaggagggcgggcaatgattacagacgtacagttaaacatgatacgttttgaacttgctagaataccacggaaaaatttagaacgggcgggcattgataaggttatcaaacagctattaaagcggtacaatatcaagaatacaaaacagaattataacagtattaagattttaattgattgcaaaaaataatttaaaaaagttaataaaaagtgttgacaagctaaaaaagctatgctatactatgtatatagtaaaggaacaaaacaaaaaaaaaagaaaaggacgtgctacactatgaaaacatacgaaaaagtaaacttaaagactcaagaactaggaaagacttacaacaaggattggaaacaagacgtttttgcttataacatgacactatcaagaaacggcaaacaagcaacttttaaattttttacgggtacaggttgggacaaagccccaagcgttaaggacttgttaggtagtttggttcgtgattataactataccttagaggaactgattgacgacctaggctattcttataaagaaggtagcaaaatctttgcaaacattcaaagaaacaacgaaaaacttgataaactattttcaagtgctgaaattgtagcactacaaacggaactagaagactattaaaattttttagaggggggaacgttttcccctttctataaaggttttaaacttagtaaaaaagttaataaaaagtgttgacaaactaaaaaccttttgatatacttatatcatagtaaagaaacaaaataaaaaacttaggagatgttaaacatgacaacttatcaaacagtagaagaacacaacaaagcactagaagcgcaagggctagcagggtatgacaaaaaaatcactttagcttttcggattgcaaaaagaaatttttcgaggttacttttgggggcttagatagtagaagccaagcgccttatttttcaacgggggcgggcgtgcttaactatgttcgttctgattggaaccaagcgggacaagcacaaaaaagcgtattacctaaaaattcagtagcttataaattctatgaaaaatgggacaagaaacaccttcacaatttaacactagaagaggttaacgaactagaaaacgacttgcaagcattaaaagaaaaatatccatatattgaaaaccaacgtttctataatattgtagcttttgaccgtgaacaaagcaagaaaaaataatttaaaaaagttaataaaaggggttgacaattaaaaccccttttgttatactaggtacataaataagaaaaggaagtgtaaaacatggaactaacagaaatcaaacaagcacaagaacaagggaacaaattaattgaatcatgtatcattaaatataacggggctacctataaatatgaaaacgtgaaaccatccgagattatagccgagcttaaaaaatggaatgggggtattatctaatgtataaaattaatgaaaccattgcaaagagtttagaagcgggggacgttatccaatccaaagagtttggatatattgaaatcattatcaataacgacaaggaagcgggaacactaacagcacaaggaacagcaagcgggacacctaacacgctaccatataacgcctataatgatgaaaattgtttcttgtataaaggcaatataaaccacattgcaaacatgaaataaattagtaaaaaagttaataaaaggggttgacaaacaaaacccccttttgttatacttatcatataataaagaaaaggacgtgtcaaacatgaacaaaccatttgtaactagcagatactcaaagaacataccatttctaacaccccatattatcagacaaggaagaaaaaactataccgcttgttatattcgttacggggtatcatttgcaaaaacctttgcaagcctaaaagaagcggggctatacttaaaagagtatgcttactaaaacttattaaaaaaagttaatcaaaagtgttgacaaagaaaaacaatcatgctatactatgtatatagtaaagaaacaaaacaaaaaagaaaaggacgtgtcaaacatgagtaaaacattagaaaaattagtagtgaaagcagaaaacaaagggcaagcaattttaaatggtagaatgtggaaccaatacagccgtgattttgaagaattaagagaaaaatatgcaatcgaaaatgatggtaaaacggtaaccttaaggcattggggtactaaaacattagagattgacctagcaagcaaaagcgtttcttattggtatggtgaaagcaattccgaccgtgattctatgaacttcttactagggcgttacggggtagcgggttcattccgttacagacctagcattgatgaattttcttacaacgtataaaaaacttaataagaggggttgacaaacagccccttttattatatacttatcttagttagtaaagcaagccaaaaattaatttaaaaaagttaataaaaacacttgactttctttcctaaccatgataaactaattacataataaagaaaaggacgtgtgaacaatgacaagactagtagacactattctatacaatccatcaattgaagtcacaaacattgacaaggaagcgggcaaggtgacggttattgacttattcaacggcaacaaagaaagaatgttaaaactacaccaaagcaaacaagacggctatcaatactattttaaaatgaacaagcgttcttattggttacatttattatatcagaaaaaggagggctagacaatgagaacattaataaaaacatatgttcacacacaaggacgagcagagaaggaactagaaatattatgcaatcagtacgctagccaattagaaggacaagggaaagagattgtaagcatagatattcaaacagtaacaacaaaagaagaaactagatattttggtacagatataaggatagaaggcgctacaattattatagtatataaataaggaagtgtaaacaatgaaacccgtaaccatttataagcttgacaaaaaagaaattgagtggtactttacagatgacgtaaaacaaggggaacaagtttggattgcagacaatgaaacaaacggcgttaaaagtataggcactatattagacgttatcaaagaaacagaaacagcctactatatcacattagaagaataaggaagtgtaaacaatgaacgaacgtaaaacagtaagaaggcaagaagagttacaagactgtataagaggagcaagaaacctcttaaaggaacagaaaagaaaaggcgtaacaagtgaatattatcaggaacaagcaaacaagacaagacaacgtataagcatatatgctcaagaactagccgacctagtggggcatatataagaaaggacaaggagggctaaacaatgccactaataggagaaaagaaaaacattgtctatagtacacaagggatagaacaagaacaacaagaacaagagttaagagaattagaatggattgaccaacaagaagaagaaactaaccgcttaacatggttattagaggaggaggaacggcaacgacaagaagaaaatgaccttttatattgggtataagaggggacacacaaggaagggggaacaagggacacacacaaggacgacacgggggcaagtgttgactttaaagagaagaacaaacagcaaggaaggaagcccctgagttttcaaaacgggggctgattgcaaaaggcaaacgggggcgcatggtaaaagtcccctagcagatgaaacagtattgtaacataaaaccccttgacggtgtgggcggtgtatggtacacttaagggggacacacaaaactaataaggagatgtaagcatatgtatggagcagttaacgcaagacaattaaaaatgaaggattttgagttttcagacttttgggggttattaggggacgaaccgaccatcattgacaaggacacacacgaaaccgtgttagaatgtgatttcatggattgggaagcgggcacacctatagaggaaatttggggggacgtaagcagacactacaataaaccactcttagagatgttatacgggacggagtgacctaggagggtaaacagtaagggaaacgactagaagggcttagaaagcacgagaggggggcttaaaaatgattgtagatgtaattgtagggctttcaacttttgggggcgtgttggcggtgtttattcctatcagtttagcaatgaataaagagggggcggaatagttggcggttattggtttatggtttggcttattggtagtaatgttttcaatcgtgtatatcgcttataagattatccatcgcaacgacaaataaagcccctagaaagcccgtagcgaggttttacgggttaggggttataactatactaaaatacaactagaaagcgggaggcgtttaatatgaaaggaattagagaggttaacagtgttttatatcttaagagtggggaaacagtgcaaagggtttataagaacatacgggaagccgtggcacatgctagcaatcatagaagaacggacgtaaaaagaagcattgtaaccgagaacgggcggacactatacgactttaaagggtaaaaatgttatttaattaaaatcatctctctgttatcaaccttatagcaacgggctttatagtctatacacacaagggcaaggagggcggaacgtttaaaaagttttgttattattgcatttatttaatcaaaagtgttgacactatgaaagccccatgctatactatgtatatagtaaagaaagggagatgttagcagatgaaaaaagttattaattggtcatatgaacaaggacaagaaagaattgagacgtataaacattttgggcatgagattacattagatgaaagacccgctaaacagatacacatataccgagatggtaaatatatcggtacaatgaataagaaaggcgtacaaggagggcacacactaagacaaaccatgcaagggaaacggttaaaaacttttatataaggggttgacactcagcccctttcatgatatactatgaatatagtaaggcgctagggttaaaccttagggaaaacgagtacagcgacttatttaaaaaagttaatcaaaagggttgacaagtaaaaacaatcatgctatactatgtatatactaaagaagaggagatgttttataatgacaaacacaacaaagaaacctaaatttttggtggtagacaatgccgatatggatatgtacgaattgggacgggtaaacactatgcgagaagtcaagaagctttgtaaagaacaagtggaagcaacggacggggaatgttatgtaatggtactaacattaaacgaggaaacaaacaaatataaacgttcatctgctactatcgtaacatattaaaaaaacttaataaaaggggttgacaaccttaaccccttttgttatacttaatacataataagaaatggagatgttaaacatggaaaaacaaattgattatcttacttattggactgacacactagcaagcaacgtgaaagagttgacacccgaggaactacactcagcaactagaatagaggaacgtatctctaaaacctacggaatcgacccacaagacaacaagccactattttccgaactgttagacactctagaagaactaaacgacacagcaaaggaaaccaactcagaagctttctataatacagtggaagctatcatctcattatgggacgagataaacgtaagaaactagtaaattaatttaataaaaggggttgacacttgacccctttcatgctatactatgtatatactaaagaagaggagatgttacaaatgcaaaactcaaacgaattattcaaaactttcattcttaacaacttatcaatgactagacggggaatcatacccgaggaatttgcccaacaatcaattgcgggctattacaaggcactagcagacctagggggcacggacgagctaacaaccttatataaagacctagcgggctacgtgtacgggggaacacccaaccaacaaaagaatgcaagagacttactagagggaacgcttgacctttccaccgttttggataggttaggacgttagggaacgggggcaacccctcgcaacctttccaccttttgaaattggggcttgactttggggctatcctatgatatacttgaggatgaccccaccccgttgttttgtgaccgtactaagggggcgtgtgcatatgggggtgggctcttggggttcatatttttgggcaaaattatttctaaaatatattagaagtcaacacccgtacccgtaaagtcaacaccctcatcgagaagtcaacacctaggctctaacaaccaaccttcagctataaaggctctatacatgtcctgcacactctgtaggtcaggtcggagtcttcttttgactactcgggctcccaaggctccaagtataggctccccgtcagcatctttagggaacatagccaagtgctccataggtataatcatcttacgaccatcaggactgactagcaccctatcctgtagctcacatgtcatcgtccaagtcctccaccctatacatcatgtctcggtagttggctcctatggctctaagatacgcacgggctagctcaccgacagcactctccttaaggggcactggtgactctacaatgaagtacgttttgcgaccttcaccccatgtgtccatgtcatctcttgagtggctaatcttaatcttaagtttcatacattatcctcctcgactacatattgagttaccgttacttgttttggcacaacaacaataggttgagttagaatcgtaaagctacctaggtcatgcactccccatctttcaaacacttcacttctataaaacttaccattgtattcgataacaataagagcggtacgcccccaatcatcttgttctaagtcttgctcatcaatacacccattgttaaaataatagtgtaaaaactcttcctttgtcaccttgtcatccccttcctatatttacagtataccacggactgatacacaagtcaacacctatctagtactttttagatagatgttgcacattgcgtggacagcaccaatacattcatttgttttggggtcataatacagatgaacagggtgctcaagcatctcaggtggatacattagcttattgtacttgtaattaacaatgtaaggcggaggagtcatagccaagaacttaccacaacaccaacacttatgcccttgctcttttaccatcttcatacgtagccaacgtctttgctttggagacatcaatttgtaatagtatttttgttcaaacatagtatcaccacactttcttcttactcatattaaagtctgaacttaccatcgtccacatagataatcaaggctttgcttgtagaccccccgtgagtacccccatgaccaaatttaatgtccaatataacagtgtttgggtacttatttagccagtcacgtaagttagcttctataccgtcacctgtatcatagataacccttacttcaatatcattagccaacattttcattacatctattcctccgcttctataacatcgtctagcccatagtattcacaatactcttgccaaacatctaaatcatatcctgcatctttggcatctctgtaatcagcctctgagtaaggctttttaacttccccgctcataagccaaacaccatagagtaatctacgtcaggtaaccctaaaatgattacatctttactttctgcccaaataaacaaatcaaatgtagagcacagaccatcaagaccttcacccataagacatgactcaatgacatctttgttgatagtggtgtccgttagactggcatacccatgacgtaggcggaagtagtattcatgaccctcagtgtcttcaaactccatttgtgtagggcatactgaacctaaatccatgaaagactcgatttcaataatagtgtatccgtttattttttccatgtgcttatcctcctataaaatatgtttttatttagtccatagtacttgcagtaacctgtcaaaccaattaagacgacctaccttttcatctatataatctaccactaagggagaatcggaaggaacctctactacatcctcatagtgaacgaagagtctacccttatcgtagtctatattgcccttgttgtcagtataatggacaatataacagtcagagcgctcataattaagactaccatcgtaacctgttattacaaataaagtattttcttcacttgctcgttcagctacctctttggttagtttaatttttgtaccgatagataataaaatatctccttctgagttaaacattgttatcctcctatagaaaacatgtcattaactacttcttctgcgagctctgcaatatcattgtaggatgcacgttcgtactcctgaagagctcctgtatacggctgtgatacgtctaaatagtagttctccatctcaggcatcaacgcttcgaagagtttgtttacgagctcctgcttagtacctttaagggttaatacctcttggaactcagtggtagtcacctttacaggtagtacttctttatgtcccctgaaatgtctgtccgaaacccctcaactctagttatagtacctttataaagagaacccttctccgctacgataacttcagcaaggtaatcttgagcattgtttacgagtactttagtgcttacagtatcgttattgttaaacttggacataaatagttctttattcatcgtcaacctcctcatctgaacttctgtcgaatagtcccaacatcaattcaggaaatacatacttagtgtgcactttaaaactaacttcatgaactccgtttacaaggtcactctgaacgctaacatcagtaacctctccatgacctagttgttgaactacttggtctaatgtaggtgggtcagtgacgattcttggtttaggtttactagaccttggcagtacttccttaacttctgtgtagtggacatatctttgcgtgtttcctcgacctaacacataatagtcagtgtaacctctattagcactcgtgtcgtagttaactatcgtaaatgtttgcctagcatccacacccatatgtttagctgattcttccgttaaacgaacttttgtatggataggtaataatgtgtctcctcttgaatttagcatattaatctcctcgtgtcatattattaaagtcagagactacccttataacggaacgttcattagttagtaagcgctctgttattgtatatgtggtatctcctacctttattttgtcaccctaccgcaggagcaatagggagctttaaagggataattttggttctcaacgggtaataaccaaactcatagacgagttctatatcatagtttaccatgttacttcccaccattcagcagtattttttctaggtctcacagctctaactgagtatccatcggatattaagacctcagcaacccgttgagtaaagccatcccgagcccaaagagtcacctcagtgcgattttcattactagcttcacgaattttttttatacgctcgatttataatttttgttgttgtgggttgcacctcttccactcttaaccgagcttcttgaggcgtaattcgatgtatccctgtcttctctagcagtgtctttgaagacatttttgatagactgtcaaggggaataccctcttcctgaatggatttatcttccttaagcaagtcattttcaataataatttgttcctttttaccaaacatgtttttaaaccaattcatcatgtgtacctccttctatttacctaagtatactactttgttgacgtgttgtcaacaaaagtagtcatacctagctgtccgtgagtatcctagcaagtttggatagtcaatgttaggctcccctgtttcttctaagaaacggtacgcctcgtcaagatagtatttctcatctgaatctattgggtatccactatgttcattattaatgacctctagataccgagcgtaagtgataggttcttttatagttaaacccaactccttagctctctttttagctgacttctgatttacactgtctgcaacaacaagggttgctccgttgatatgggctaacccaatcagtgcgctagttttccctgtatttctttttccttcgataattaacatattttacctctttccgcacttataatgcaagcgcttccttcatttgttttataacttttctactgctcaagctctctatagcctttactgtcccgtaagagatagctttctctcctgatagttcttccttaccacactcattggataacccaatcgcattgtgagggaataggtagctaccaaaagtagtatccccaacagggatgtccttaattattacagtttttgcagttttatacttttcgtaccttgctacctcgtcaggcaatactagctctagagcctcccaaacaatatctcttgcgaggtctctagtttttacatccaaagtttgtctttccctattttgttccgatagctcctctaactctttaactccaagagtaaacaaaggagtgatagtttttgccatatcaggtaattgctttgcccgatttattaacgactctttagtctctaaactgttcatggacagatacccctttcagctcaggtttaagcattgtccctgcatcaaatatatgtacatagttctttgagttacgaatatatacttgattagtgctatcatctcgtagctgaaattctgtagtctcaatagaatatacttctacctttcctgaataggggtcagccacttcaaggtaaccattgtgaatacctacaacaggtagccactcacttctaactttagcctcaatcatcctcttacctccttagataaagaacattactacccacccaacaagcataaatagcaacgttgatacagtagcttttgcaaatatcatccaaacggactcttctgtggttggggtagttttagctgtaataaagctaataaatacatctagcccaagcgcctgtgcccatgtaagtgttaacaccccaaaggttggagcaattaacccgttccacaagaacatcgtaacataccctccaatagcaaggctcaacaccattagaactaaagccccaaacaatttaccccatgcgcttgctaattcgtctcctgtattcttattcatcgttttcctccttaataataggtatatctacctcttggtatgagcctacaggggctgaagctgtaaacactctagtcttgtacgtattatcatgccaagttgtatatgctaaatccataccgtaagcttcaataatttttaacccgatttgagttgctaagtaacgcttagtgctttccagtgcggtactaaaatcttcttctgaaatggtgtcgggcaaagtcaagctaacagattctgtcaataccttccatttctcaggctctttctgaataggtattgtaacgtagtctatactattcgacatctagaccctccttaggtttaaatacccccacatctttgtagaagtcgtagtcttcttgatagtttgtttcaaagctcttcattacatttagcgcacgctccatgcaaccataccaaaacattctaccaacttctcctgttaaatatgtctcatccacgtgtgtaggttccttctcggacatttcattcacaagggaatcaagaacatcagaagcgccttcaccgcccataatgaactgttctacaaccataataaacttctcgacctctgtacggctgtctacgggctcttcctcttcttgtggtacaagtaccatctctagactgtacaaccctgtggcggtctctgtatagcttcctgtgagcatccatgtaaggtcattcacttcaaaagtcatgcccgatttataattctttctgaggtcatctagtgtactatcgaccaatagatatgctgtttttgtttccatcttagtaaatctcctttggaatactttgtgcgtatgtgacggtttgctccgtgttaacgagacggatacgagtagcatcaatagggtatagattagggaagcccccttcgtctataataaccacatgattattctccacataattaacgttaacccactcataacatatatatgcttgtaacattatgttcccctttcttatattataccaaaaacgtaaacgcaagtcaacacctttttgctatactcctgaagcgttttcttgctcttgttctattaactcctccgctatatcattaaagaagtcatgcacattttcttctatgcaatcgacatttgaaagcatagcactttccgtactagggttgaatactacttgaactccatcccatgccatatctccaaagtcatcatagttatcttcaattagaccaaggattttctcattaagaggtagactttttaagtggtctagacgttttaaccgtttactttgtttatagcataggatacctaaggtaatagccacacaaagtagtgcagttattgccatatataaaactaacatacagtaaccccctaatctacgacaatgctatctacagttattgcccacatgtcagataatctcggtggggttcctagtgcctgctctgcttttttaatagcttcttttttagaagtggctctaactttgattggggtcgctctcttccagtcagtatagtaatatcctgtactatctttgcctgtagctctcatctcatacgtagctgaaggttcagtctccttatctaaatcaaaagaccaattggctaacaaaacttccatattagagtacccacacatacgaccatcactatctgatacccataataaacctctatcaactttggtagtaaagttataaaccttacctgttgtgaatcctctcgacccattctccccaataaatctagcttgtaacatatttttctcctcctcacactatttcatagtctaatcgactaaagaaatagtaatcttgtactttatatagagcgttatcttgaaaaatttgtgcttccgctttgttctcggataacttatcccaatcacctgtaacatacttccaaggaacccaaggtttaaatagaggtttcaccaaaactcgtactttaggtgtcatattattcctcctcgttaggtacataggttgagtcgtaggataaatgtacccgtatccacatccaagtatcatacgcctctagccaatcacctttaaatagctgaatgttcatgttcttaaacaaaaaccataagagcttccagtcatgagacttaaaccctactattcttctactaatattaatcatctttagcctccaataccgtggtgactttcattccgtacagctcagcctctaatagaattacagttctatgaatagtatcattaaaaatattttgctttgtatatcctaatgattgccctacatatatatgaacatctccatgacccttaatgtagccttctttggattgttgctgattgaaccttgcatatatgtcatggatttccgatactgttttttgctcactaaacccttgcttatcattgggtaagataataaatagcctgccatcatctaagtgacaaatctgccctaacaactctgtattgtctaatatatctttttccataatatccccctcaaatacctaagtttaactgtgcttcaggacgagaaaacttttcaatttgagttaagattctaactgcttgagctccaccgccaaaaccgttatcaatgttaacaactgagatacctgaagtgcacgaagttaatgctgtatttagcgcagtatacccatcggaagatactccgtaccctgtagatgtaggtaccgcaataacaggtaggtctactaaacctgctaaaattacaggaagtgccccttcaaagccctgcacagatacaattgcgtggctttctttgatggcatcaacggattttaatgttttttgaatgtcatctacaccaatatcattaaaataaacaggcgtatacccacttaaaagtacagttaagccaacttcatctacgatatggcggtcagcaagacctgctgaagtgatggctactgataatgttgattttactggtctacgatagataaaagctgtttgactagataaacagtaagtcaaagtagggattccacggacattttttgcttgttctgcattatttacaataattttgtctgtattccacttaatatcatcgaatgtcttctttggtagccgagtaatcatgatattttcttcttcactagtagcttcaatctgttttttaatgtctgttgcgctcttatttcctccaaaaatggttcttaacttaacaaaactcatagtttttctccttaatatgctgtattttagataattataccactattttgtgctgttgtcaacactgctactctaaataagaagtgtatccatagaacaacacagtttgcatagctgtgtagaaaggcattgtcacgtaaaccttatctccatcgtataaaatatgcccgtcttcgtgccactgctctaatatctccatttcagcaggctctaaattaactgcggggatagtattaccatttttgatagaataatctacaaaaggtagtaaacgtagcttacgtacagttagttcttcccccataacagctttccatgttttctttaaatcatctgttaacattcctcgtgaagtttctacaatattcatttcttttctcctttcaaccatgcgctatcgttatctacaatgacatctcctgcacttgtaggtacaataaaagtcatgtcatcaaaatctccacttaaaagagacacccgaacgttatctaaattttgatatacctttaactcaccctcaataccaccaaagttaaacagcaagttttctgttcttaacacatcggttactttagttgatgccgtatgagttactttagctttcttatacatattaaccaccccaattgaaagttaaatctacaaaagcatctgacggtaaattatcttgctcatatagggtaaccttatacaagccttttttgtccacatctccctgagttacatcttgatttagtttaaaatgtgggtcattctgctttgtgtagtagcatagtaagtcatcaatacgatagattacagctaaatttccttcaacttgccacttagttgtgaccttttttgtatcgttcattatgatttacctccgtgcaagattattttgtctccgttaagctcgatagattgaaccttaacagggcttgaatgagtgtaatctacccctgtcctgtttcggtcttctatacttttaagcactgtgacgtggacttcaaccacgtcatcaggcatttgttttagtaactcaataatcatatctttattcatagttaccccccaaaaatatccatttttcttatgagtttcccattcatcctttgtgaaaactgtttgtacacgctctttactgccgtaacagtcggtggtaacgtcaacccacacaaaaggatagtcatacttagctgtccagtcttcttcatagggcttttcttcatgtatctctacaatatattgttctaatagattcatcgtatcctcctatttagccttgaagttatacacaggcttgacaattctgtcaatatctacagtatcggtaatgatttccttgatttcttctgcatctttataagccttaggtgcttcatctaaagtactttgaactacagaagtagtgtagattccttgcatagtatccttgaagtcttctaggctaagaacctctttagctttacttcgggataaaactcgccctgctccatgaggtgctgactcattccagtccttgttacctttaccaaccccaataatagagccttccttcatatttaaaggaattaccaaacgtaaacctttacgggcatcagtagcccctttacgaatagtattgttctcgatgtcgatatagttatgaatagagtcaaatcggtcaatttcttcccaacccatccctttaagaatagtgtccacaatcgcattacgattcatcaccgcatagtgttgtgttaactccatatcaataagatacttttctaagtcttcaccttcaaggtatggtagctgaggctttgcattttgccgtttaaagcctgtgattgctgtttgaatctctttatgccgaccttgtgctttaagctcgctaatgagctctgagagtcctttaacgtcattctcgtggtataagtctgcaatatcttggtgatatttagctaccttaacacctaaacctcgggaacctgtatgaacaagcaaataatagttatcttcgtcatctttacttaattcaataaaatggttaccaccacctaatgttcctacagagttcgcaatacgagctacaaactggtcttcataagctccttttacattaatagacttaagcatatgttctactgcatgaaaaactgaactgctaataggcttactacgaacgtcaaatcctgaaggaacacctgtgttgattacattgtctagtttaccccactcacgagcatccgtgtttttcaacttacctaagcaggaaaccataattccgcaaccaatgtctactcctacgatagaaggaactaccctagtgatagctttatcatagtgaatagttgtacctaccgtagagcccttaccataatgagcatcaggcataattctaacaaccccgccttcagttacaggctcatttaacattgtaattacctgaccgatagtcacctcatctacagttttaataaacatctttgcttctgcatatttacctaacaactcaattgtatttttcatgtttccactcctttataatttatacgcataaatatctagaccttgaccccctgagatgtcgtctaatatatttgaaactatacgccagtcccctcctgctagcctacatcccataccatagggcacacctaccttacctgtatgtgacttagtttgagctagcgctgttgctagagcccaacttaaggcatcgtaatcggtctgtaaacctctaccgtagttatattgcccgtataaattgacaattaactgtggtgtattggtgtaattactagttacaaaagcgcctgaccatcgacctaaacggtctctacttccaacaggaatatcgtagttaatatctgctagatataccgaaggatactctttagctatttgcttcgcaattcctgcacccattttaccaaaacagttagcttggtgcataatcattgtgcaatcactctttaacaaatctccttcaactataattaagctcaagtcataacctcccttactatagtaatcatatcatatatttaagcttaagtcaacacttttaaattaaaaaacctacacttttttgtgtaggtttctcaactgttattcgtcttcttctagtaagcctagctcttctaactggtgagtgatagagcacactgagcaggtacactcgtcataattttctgtagagataccttttaccacagggttctcatcttcagcaagggaagcaatgaagtcattggcaaactgcttaccaatttcataagctgttactagctgaatcatccctacctcttcttctgtaagaggcgttttcccatcagctctttcagattcgatattgctaagaatttcctctttgttaaggatttcttctcgcatacggtgcaagccacgtactgtgtttaagatagtatcgtgagtatatccttcgataacatcatctccgaaagtcaaaacaacacgttgttcagccccgccacctaacatagctaagaatgcttgcaaaccttccatcatttcttctgcttcgtcagttccttcaatacctagtagttgttctaatagttctttttccatgtttattagctcccttagtttattttttattacatacatagtatatcatgtatactaattaatgtcaacactttttgttaattaaattcatttgcttctaggtaaccatacccgtacaaggctacccctgtgaggactacccaaattattacaaagaatatggttcctactttaccgtcagaaatgttactttctacaaacttgtcataggcagtactctctacatatatttttctaccaaaggcagggctcaatcctttttctgaagcgttagctaggaaagttaactccatcttaacaggtaccccgtagtacttcactcgaacatctgaccttgggtgtctagttgtgatatgtgattcagggaatcctgaaaacttatcataatcataactatggtcattaaacataatagttttagtagataaataatctgtatggtaatgttcccattcccaataggtttctgttttcgtgtgagtgttaccttccgaatccgtgtacgttactacccgagtcttcataacatagtgctcttctcttcttttaagctcagcatacttaccatcaatctcagaaaactctacaggttgttctgcggtaaacaacccatgtgtgtagaatattccttgttgtgtatctaagatgtaatcgtaagagtctttgtcatccgcagggatagctgtctcatacatagtattattagctaacctagaatcttccatcttattatgaatccaaatacctgtcataatcataaaggctacgataactgtaggtagaataaagtacctaacctttaactcatcccgtctcatttgttaaacaggtctgtatgacctgttgggttaacaggaatactcataacttcataatcttgtgtttcgtaaccctgtaaggacaataactttctatttacaaaggttctagtaaacttcttgtattcagcaacttgtcgattgtaggattttcggtggcttgcaacccgattttctgtaatgctgaactccttcatagcctgcttatagttatcttgcgacttaagctcaggatactgctcgactactacgtttaatgtactcttagccgaatctacgttaccactctctgcttgctgacgtgctttaactactaatgcaagagtctcttgttcatagttgttataactctcgatagaatccaccaagttagaaaataaatccactctgcgagcttcttccgcattcaaatctccttgagattgttcaatgttaatctcgtacttgatggcacgattctctacgttcttaaccccgaaaaaggttacaagacctaagatgaataccacagctactgaaatgatagcaatttttgttttgtcaatgttctgcataatatctctccttatcgtttatacacatagtatatcacgtatttaatagggtgtcaacacttatttaaaacattgggtcaaaaaagtcataatcataatcaaagctgtcataaagcccgccgttgtagtcccaatcagagtcagggtcgttataatattgaaactctaatagagtttgtctttgttttttagaaattgtacgaacattctgatactgccaaataatgctcttacatattgctagtatttctgcacctacataacctaactcagtataggttcctgcaccaatttctctatcccctctacaaacaagttcggcatctgaaagtgcctctaagtcttcccgtgtgaaagacatatgttttactcccatgatagctcctcctatggtttaccatttagtacccaatactcatgccagtcttttctaacataatcagttaaaaatttatgccatttcaaactagctgtcattacctgattgtcccacacatagttaaaagtaacaaatctaaatcgcataggttgtgcgtaaacattgcgactaagctcttcctgtgtaggaggaagctccccataagcaactgatatgacagttacttctgtaggaagcccacctttcttaggaataaatgttgctccttgaacatcagccaaggaatatctaccgttgtttatactcatctaaacttaatacctcccaatttatatcagagttaaacttaattaactgccagtctatctctgattgggtgatggcaaagttcttatcatcaataaaaacatctactcctagcttcctagggtcatttttgtaaacatcttgcaactcttttggattttcattaacatagtcaaatgtaatgtcatggttttctaaaaactcaagagcatcacgtaaatcattacccgttcgacatgtccaaagaaccaaaactagacctttttcttttaagtgttcaatagtctttttagccataggtctaagttccccaattgcaggatactcagcaggctcagtaatagttccgtcaaagtcaatagctacatatcttaacttcatatatcacccttctttcttggtaataagccctgtgcttattctctttacttctagacccttttgcctagcatagttcacacaattagcagtcccgctcttagtcccatcccacacagcccaaagcacttgtgagttgtccacaatccactcatttctgttttgtagaacagcactaacatcatgtgcaggtaccgtgtctaaacctgacgtgtttacctgcccatctgccatacttagtatcatgtcatatagcgttttactttcagctctccatctagaagattgattggcaaaaggtattgcacatattaacttaatacggtcatggtacacatcttttaattctaggcaagcaatcgcatagatagtatctaccccaagtgccatgcctgatatgcacacaacttcattatacttcttcagcaacttctctagttccaacttgagaacataagttaacatcttgttctcaaaagcaaacgggtcataaccacccatgagcttgtgtggtctgtgtcccgttatgcctacaattattctattctccactaggtgtccctaacacagaggatagaggttttacttcaactcctaggtaagacaatggttccgactcttctaagcccttaacgatgaactcaaaagaagcttgctcaatgaactcaatgtctaccttgtcggttaaagggactctgagcataagcttaatagcatccttatgcaacaagtatctgaaagtcccttcagttatttttctagtagtattcttataatgaccaaaaagagcaaactctccatgaccatcctcagtgtaggataccttgagggctttacgtctatcaatctgaaagttgaaatcataggcgtttcctacttctaagtgggggttatctactttaaataaatagttaacccctgccttacctacatgaactttctgcaataaaatcaagtcattctcaggtacgatacccataataccactagctgtagtgataatactcaatctacttcactcctaatttatcaagttttttgttccattcgagtacacgtactcccgcaggaacttttacatctttctctccttcttctattttagcataatatgctcgaatgttccagtcatacatagctaaccatgcgtttacttggtataatacatcacgagccataaaccaaacattacctgaagttaagtttaagaagaagttgatgaagttagatgagaaccaaaatgtccaagattctttaagtccaataatcattagaaactgtgctgttacactgattacaaatgttagtaaattacctaaccaaataagtaaacctaatgttcctgcaccttgaacaaacccgaatactccaccgaagaacacaagtaagattaaccctgattacaatgaagatacctgtaaagattgtttgttctttcttcatagtaccaattttaactttacctgactcatctttaaacttggcatcattccatcgaactaaaccgattaggtgagtcaagccaaagtaagctcctgcaaataccatacccattgtgccaaagtaccaaaagattagcatttcaccgatgttagacaaaatacctaggatattacctaaggttccctctcggttagctaagaaaactacacaaggaactcctaaacaatatgctgtaataaagaacccaatttccgtccaagtgctagggtctgagataactaccccgctccaattagtgatgaagaacccaataactaaccctacaagaatgatacctactacgtagatgttacgccaagaccctccttctagcgctactttattcataaagctgtaatacttatccttaaatgttggttgtacttctttcatgttcattctcctattctgtaattaagtatttttttattttatctgctgtttttaacatatcatcatagtgttgttgtactaaaccattataatgagctatagcttcctcttttgttttaaatacttcaatatctctatggtacccttctgcttggtacttaatatcttttttgccttggtcattattgtacacaacgccctcaacaggttcaagcttagaatacggtttactacgggtcttattgacccgagtatactcggttatccatacagggtctcctacgttcattgtagctagttggtctctccaatacataaagtttactccttatctgctatgaacttagcttctgccttatttacaatttcttgcaactccacaactgataaataatcgttgatatatccatcaataaccatcttgcatagttcataacgatttgcataatcagagtccttaatttcaacgtaagggatattgtatctatgatacaactccttaagcagttcttggaatttctgacgtttagatggttctcccaccttacgcataccatcattaacccattttgtagagttatctaataaaataactaagtctgaagggtctgcgataattaaatcttccacaatagcattttcctcaccctcataagtgattgaaaaggcttgtgtactgacgtactttgtatctgtgatagcaaatcttgttgcattacgtttcgcaaacataacgtcttcatgatgagatatagcaatacgggtgtaatcataagattgtaaagcaagctcatctccaccaagctcatctttagcccataaacgaccacgctcccaaacagtcggtgttccataatagttacctagtttgtcaaccataacagtttttccgctagattcaccacctgatatttcaatcatagggcttaaaagctctttgctagcccgtggaaggtactcccaatatttgttagggtctttacggattttagttgcggacaccttagaacgctccctagcagggtcatatagcgctacacccttacacccaaagtattttttatagttaatctcatcttgaggttcactactaaagaaaacagtatcttcccacgcagtcttactaatcgctctttgcccttcgatagagacaccttctacagaagatactcctttctttactaagtcagaccaacttgcccaaccatcaggatacatagggcaatccgtttcatcaactaatacagcataaatgttaggttgttgttgaaatgttttctgaacaatcttaagtttatcatacttagttagcttcttagttaaattggacgaagcatataacgcatcagacacaatatcactatggctaataactacaataatttcttcagctttacccgatgcccattgaatcatgtccacatgccctctgtgtagagggtcaaacttacctactacaatacctctcttatacatagtatttctcctttacatttaatctgttttcttaactgataccaacccatgttggtaggctttcaatacacaacttggacaaagcctaccattatctttaaagtcctcaatataaatatccttctcatttatagcttgcttttcaaaataggacttaatatcagcgttaccacacaggctataatctcttccgtttaacctctcaaaagaaatatgccaagtagcattagtactattctttaacctaaatatcttcattagctaaaacatcaactgctttcataaaagctagctgagctgacatggaattgataattccattgcgaatgagctcttcaacatctgttgtcttcaatacacgaagctcaacatattcatcagcatcaaactcagtctcgataacagtgtcttcatcaatagggtctacataaaccatatacgcatgaatctgttctaaagtataccctagacttgcatatgcactaaacagatggataggttgagtgccttctgccatatggattcctaactcttcacgtagttctcgatgaacagcagttacatatgtcgggtcttcagggtcaatacgacctgcgggaaatccaatttgtgtcccattaactacggtacggtattcctccccaagatacataagcttgccatctttggttacaggaacaataagcaccgaatctccataggttactacctgacgtttgatatggtctacttcgtctaaaccgtcaccaataggtacacgcacctcaatgtctctttctactacatcgaagacgacaccttcaaataacttcttctcttctagtactgaatattctttcttcattgttatcccccttacactattataatagcctatattgatttaaaagtcaacactaaatattcatgttattaaaatttatttactaacgggttagtattaatactagccacaagagatgtaaatttaacatacatattattaaagtgctcgatgttgttaaaacttcccgctctaacatctagtttaaacactgtgtaaggcaccttatatatcagttcaaaatctcctgagttttgatgtaagataatatttatacctatatcatcaatgtactgcttgccttgagtctgtggcaaagttgcccataagtcccaagtatagtgctcagtataatacttaatagcctcatccattgttaatctagttgccatcgccaacgacctcccattgttccataaccgacttggggtcgtcccctaatgtttgccaatgtgaaccatcatcgttaactcctgcaatagaaataccgaagctactaaaagtaaccttaccaatgtctcctgatttcttgtgttgaactactttaccgatgagttcttttcgttcaggaaacttctcttttatcattccattatccgtcatgtatgctaaggtttcatgaatctgctcagcagtcagcccttttgtttcttctctctcatgctttgtaaaataatctttagccatgtttaccctcctaaataaatatactctctatcctatatagagagtataccacgtattgtcaactaagtcaacatatatttttcaatttctatagtttttccctctaacaaggagtttttaacatcaataattctttgattacgacttcccctaaaaggtatggttaaatctcgttgttctaatatgaacttaccgtcaacgagaacatcaaccatttctaataactctagcttgtcaggagtccctgatagcaactcttcaaaagtatatcctgaccatgaccatacgtccttagtatcaccgaatttctctcgaacctttgatactaactgaatgcacaaccctgtgttcaagaatggttctcctcctaataaagtcagcccttgaacataatcattagataaatcttctagaatcctatcttcaagttctgctgtatagggttctccatagttaaaatcttgtattgccttattaaaacagcctttacagttaaacaggcatccactaacgtaaatactacaacgaacaccttccccatccacgaacataaaaggtttatagtcagctacatgccacttactatatttatctgctgtccatttttgttgtttattcaattaaatatcctcctgtactaaagtagtcacaggaactacttctaatggtttgtactcttttggcagatatttatttagagttttcattctagttgtagcttccgctttgttgttatataaccttgcatcactcaaacctgtactcatcgcatacaactctaaccctgtaatgtagtaaaagtcattagccccttttattgcatatttacgacttctttgcaatgcctagcgcctccttcgcaacaacatctgctcgttcattgtatatatgacctgtgtgcccatctaccttgataaactttaagtctatacctgattgaatacaatggtctacttgttgtttgtacatctttgctaaagggtctctagctttgaaagcgcctgtagcccatttaccaacacctacgtagtcatggcatataataatctcggtcatcttattatcttttgcccactgaatagctagaagagctcccataatttcccctgcaatattccttttaggtgtgaaatcagggttatcaccacttaggcttacttcgtctactattgcatcgttatatacaataatagcactcccactatatttagaaccatccccaaggttagagccatccacgtaagcataatacgtgtcaggctctccttcagcataagttgtttcttgtaggtaactcgtagcagtgtttaaatctttaaaggacttgtactctgcattagggtagccttcgatagcttcctttgcagtgtcccaagaagtaaatattcctgtttttctacctttctttactgcatagtacttaatcttcatagttcacatcctcagggcgcttgtcgaatctaaaactcttcaacctgccgaaacgtacattttctgtaccttgagcgttttgacttttctcactaaagtaatactcaacgactttacctctgtatttttctttgttgttccatatatcatctcgtaagctgtcactaattgccccacctactttagttgtcccctctttataagtaacaatcatcccacccaatgtgttctcaaacttagtaccttcttttcccttatagaagtctaagactacaccatcattcgagtataaaccttttacttttaacaaattcttagttctcttggtttcatacttagcagaggagttattgacaatgacaccttcactgcctgcttctatcaacctattagcaatagcataaacctctgtaatatcgttacctcgatatagaacaggaacttttacaatatgggttgtatcagctatttcatccaactcttctcgtctttcagcataagacttagatgatatgccattataaaattcctgaacaggtagtaaatcaaacatatggaactctaaccctgttttgttatcattcttagaacggactacagattgcgttgctctaaacaagtcaccgctgtttaagccttcagggttttccaataacagttcaccatcataaacatagccatctttgagattttccatctctttagccaactctttaagaccttcaatagggatacccttgcgagtatagaaagttaataactgattgtctttgatagctacgcatcggataccatctagttttaatgttacaatcatttcagtaatgaactctaaagatttttcttttcgtaagtctttagctagcataacaccaaagtcagggcataagtctaacccctcttgctcacacacttcattaaataacttaatacctactcctaagggaacacctgtttttgttgcgatactcctaaccatattaatatacttactatcacagtcagccatcacatgttggattgtccgaatatctttatcgtcacctacacaatcagctagaaatatcattaaccactctaaatcaggtatctcgacatactcccctgcttttactttcttatccaagcttttacgcccaaggttagtaactatatatggatttaccaaaaacttaaccaaataatacaatataggttcttctttaaagtaacgagccatgatagctactttgtcttttttacctgaatgggaggacagctcctcccacatttcccaaactttagctaaatcattattcatagttatcctccttagatagcaatttcgtatttataactagctaagggtttataccctgatagcgtagcatctgatagtttgtttttaaagaagttactcatatcaaagtcttcggggatattcaaagtaaccacatcttggataccgaactgagctttcattttagggtctactattttagtactgataaggtctaccatgtacttggtgaactgctcctctaaagttggaatatgacgttcataaacgtgcatgttgtcaatattccagtgcattgttccgagctctaagcctacaaacttagctacatacgcatggagaacatggtattgataaacattaaatgggagacctaaacaaaaatctgcgctacgttgcttaacatgtagattaagttttcctccgtaaactgtccaatgagttgaccacacacaaggctctaatgccatgtcatctaagtcatcaacatcccacaaagttgtcataattcttcgagagctagggctatgaacaagcgcatgtaacatgtactcaacttgattcagggaagtatcgcaattatcccaatttgcaatctctaaaggaatatttcgtgtcttgttagccaactgccacccataagcctttccaattgttccgtcagggcgctcccactcatcccatatgtgaacattacgttctttaagccatgagaccttattagacatttcttgccaaatccactgtagttcaatcaaaggagacttaacaggaactcgttttgaggttaaaataggaactcccatatcaggggttacctcaaaggacactccctcaatagatttagtaatagccttctcaccatctgcatacacagcacgaacagactcaatatcttcctgttgtttaccttcttttaataattttgtacctaactccatgtataaatcatcaaatgttctcattacttcctcctacatagttgtctaaacgtctgctttggacatccgacatatattttttattttctctcaaccaatcaagagactcaccgcttaaagtccgcccttgtcgattaatcacagaaatagtatcatatggggctataggtgactgtccgtgagagaagaagaatatcatttgttcaatgtcctcagaagctaacgtactgtacgtatctagtacctcgtcaggatacttacctctgagtgtttggataagcttgtgatgcttcccatataaacaagggtaaaagataccatcatacattaaaatccctgtaagcccctctccttgcgttctaggctcatcttctgactccataatctctactacatcaaagtcattgtacccaccaacagagttgatatttactgatttaccttctcggatagctttctcataaatagacattcgtttagtctcacgtttatgcttatctaccatacgaggggttcctctaaccataagagcttccatgatgtttccgccaagctctttgaataagtccacatagtagtcttcatctgcaaaaaacatctcaggggtaacatgtcgccaccaaccctcaccaaacctaccccatacgggtgttggcttcttacaaaattcttctttagaagagttccaatattcatcaggattttgtcgtaggtactcttcacgagttttcttttctaatttctctgcatccctaaggtcttttactcctgctagtgttactttaagtgcttcgatatttgttgatggaatatgtcgtagcacatcaacatataaatctgaaatattctcatcaaaagtctttgcaataatcggaagcatctcctcagcatcctcttttttagtaaaagtaaacatcaatactgaatctgctcctgttgctcttgtagcctttactacataacgctcagcccatagtcccattattagttcctccttagtttttagaaaatttgtcaatcgctatcttagtgcttattacagcacctgcttctgcactgttggcaaaaggtacttctttgatggagacttcctcccctaacatttctgatattactgctacatgagtttccgcaactgcatagtcgaatgtagctaacggatacttttcatgaagaactacaaatgctacagcttccataaatacctcctaaaaaaaaatatactctgtatcttacaatacaaagtatatcatgttttcatgtttaagtcaacacttatttattaaattatcaactaacaagaaatctctgtcagttacaggctctacggtgcctaataagtatccattacctacttgagagaagaagtcgtgattacttgtcgtggtagataacccgtttataactactgagttgacatcggatgctgtggttgggaacaaaggagatagacctaaattatccattgctttgttcaaattgtactctagaaatctctctacatcagaaacccaaccgttgtagctgtataggtctcgggtatacgctacttcattgtcccacaagtcaaaggcaatattaacgacccaattctttagctcttcttgctcttctactggtaaggcttcaagacctctacggaacttatacccaatataggttccatgaacagtctcatcacgaataattaatttgattacctctgccgtatttgtcatttttgcttgcccaagataatatagtggagtatagaaccctgagtagaatagaaaactttctaataaaactgagatggctttcttttgcaaaggagtacctgttttatatatttcctctaccttattagctttatactgcaagtgtttgttagtagaaatccactcaaaaatactatctatttctgttgggctgttgaaagtactaaaaatagttgagtaacttttagcatgtacagactccataaaaataatgttattcagcacagcttcttcatgaggtgttactgcatcgttaagtaaagattcaacccccacttctgactgtaaggtatctagcaaagttaaccccccaaagaccttgttgataaggtctttctcttgagggcttagtttgttccaatcattaatgtcattagctacaggaacacgagtatcaagccaaaactgttctgttaacttagtccatgttgctttatcaattacgtcatctattctattccaattaattgctttcatagtatcctcctaaatagtacagctttcacattgtgcaatcccaacttcttggtcatcatccgtaaaagtacgtacatagtatattgttttaataccttttttccatgcgtagtgtcgtaataatgtcaaatctcgtgtagacattttaccacctttaggaagccaaggatacaaaccttcgggtatagctgaccgcataaatagagttaagctcatcccttggtcaatatgtttctgagcacttgcatagatattaataacgtctaacatagaaatatcatatgcactcttatagtaaggtaaagtctcattagataatctaggcgcaggatagtatacggaaccaattttaccttcttgtctttttctctacaagagaagtgattggatgcaaggatgcactagtttcattcacataagagatagagccgttaggtgcaactgctaatctattttggtgatatagacctgagctcatgatactatgctttaattcaatccagtcctctttagtagggatatggtgattcttgaatatatcatttacctgtaaatagcttgggaaataatcgtaggcatcattaatgtatttttttaaagtaagtcccatctgcataggtagatttctcaaacccttcaaaagaaactccacgttcttgtgcgattttattgcttgctttaagtgtataatagttcatcatcataaagaaaatgtccgtaaattgtaaggactcaggagaaccataatgaatctgattggtagcaaatagtgtgtgtaaccccataccacctaaaccgattgtgtgtgctttatcattaccattacgcactgttggaacttccccaatactagaagtatctgtaataaaggttaaagctctaactgctgtttcaatagacttttcgattgatggggacgtttctaacatgttaggtatgttaatcgagcctaagttacagctaatatcagtacctagctgagtgtatacttgctcttcgtttagcacagatggttgctgaggctgaagaatctctgaacataggttgctcatgataatctttccacatacagggttagctcggttagctgtatctacattcataatgtaagggtaaccctgactcttgttgtagttttcctatctctgcatctaggtctcgtgcttttactacagtgctacgaatatcagggtttttaatcatgttttcatactcttctgtgatgtcaatgaatgagaaagggacaccataagccttacttgcatcataaggtgagaataggtgcatcataccatcttgttctacaagttcataaaacttatcaggaactacaagacctaaggatagcatcttaacttgcttagctgactctgcattctcttttcttgtagcaaggaaatcaatcacatccgcatggaaaatgtttaagtatactgctcctgctccttgacgttgacctaattgattagcatagcggaaactatcttctaaaagcttcataataggtactacaccgctactagcattatcaatgttcttgatagggtctccaagagctctgatatttgaaaggttaatacctacaccaccacctagcttagatagctgtagtgcactattaacagtacgtccgattgagttcatgtcatcctctacttgtagtaagaaacatgatacaaactctccacgatttttacgacctgcattcaagtaagtaggtgtagcaggttgataacggttgttaataagttcatccgctaaatctaccgccagttgttcatctccgtctgccatcattaaagcgttaaatgcaatacggtcttcataacgctctagataacgttccccatcacttgtcttcattgcgtattgtgtataaaatttataggctcccataaaagattgaaaccgaaagtttttatcatatatacgtttaaacaactttttcgtgaatttaaaactatatttatctaaaattgttttatcaatataattttcactggttaaataatctaatttctcttttagtgtatggaaaaacacagtatttctattaacatgttcaataaaataagctttaacagcctctttatccttatgcaatggaatagtatcattttcaggtatattaacctgattgtttaactcgaagtacgtagtcatttaatgtcccccaaaatcttgtttatttttttctatatcttcatcggttcctgagtattcgaaggaatacaacagcggtacattatactcttttgcaatgtcctttgccgtaaatacatacaagtcagcaaagtttaaattgccactacccatcacccctttaaaattgcttaaatcgttgttttcaatgaaatcatttataggctctgtaaggtctctttcgtatgtgggtgctactacgataaaaggttcgtttatagataagaaagggtttgcagggtctatctctacacttggtagagatagcttatctacaaaccgcttaacattgcctgtaatactgtagtaggcaataatcaattatactgccaacttagctaattttgcaggttggaaccctgagaaaggttctcctactggtggtactacgaaaggtgcacccatagcgcctttagcaattgcttcatcccgaaactcagggttcaagtcaatacgtttttcttcgtaagctacccccaatttatctagttctttcttagtgaacgtacattgtccacagtttgcttttgagtatactacaacttttcccataatatttacttcacctttcattatatgttatcatatttttatttgtttgtcaatagttaaacatgtttaactcgtgcatcaatttctttcttacgaccataagcattaggtctagcttgtggttgccctaaataaccgcactgtcttttaactacatctacagtcttggggtctgagtttccacaagtagggcatttgtatcctatctctgtaggctcaaactctccctcaaaaccacataaatgacatttatctataggagtatttgtacctaaataacctattttatcataagaatagtcccatacttgctctagggctttagtattccatgtcattacaggatactcacaataatggataaaccctcctgaacagaattgaggatattctttttcaaaatcaatcttttcaaacggtgttggattcttacgtacatcataatgaaaactatttgtgtaatagtccttatctgttacatccttaacttcaccatatttttctttatccatgctacagaatcggtcagtcaaactttccgcaggagtagagtacacagagaaccatacaccatatttattactcaactctaacgctctatttttcatcttgctcataatttctagcgtaaagtctttagcttcaatgttaccttcccactctccgccataaaatacagttgctacttcgtaaagaccaatgtatcccatagagatagttgctcgcaggttttcaaaaacttctttaaccgaatcttcactagataaacgtttaccaaaagcaccgtatttataaagaataggtgccatatcagggctagcattttcgataacatgtttcattctaaatactaaagcttcctgaacgatagctagtctctcttcgaataactcccaaaaagcttctttatccccgttggactctaatgcaattcgtggtaaattcaaagtcactacgcctaaattcattcgaccatcagcaacttcattaccattttcatcctgccaaccttgtaagaacgaacgacaacccataggtgatttatatgagccagtcaactcaactagtttatcatagttaagaatatcagggtacatccgtttagttgcacattctaaagctaactgcttaatatcataattagggtctgtgggatagaaattgactccttttttgattcccataactaatttaggaaaaatagcagtacgcccttctttacctaaacctttaatacgaacttttaaaatagccttttgtatttcacgttcccaaatacctgtacctagcccaaaattcaaggtataaaacggtgtctgaccgttggatgagaacaaagtgtttatctcgtattcatgagcttgcatagcatcataaatatctttcctagttaatctttgtgcctcttcgactacatgactgacatccgctattttttggttctcattaggaaaagcaaaagataataattgcccgtaatgtttattataattcatctctgcatatttagcaagaacctcgtccgctctattgaaagaacatccgccatattgacttgaagcaacattggcaataatttgagatacctgagccattgcagtatttatactttttgggctttcaacttcagcatttccgatagtgaaaccattctctaacatacctttaaagtctatcaaacaacagtttgtcataggactgtaaggttgataatctaagtcgtgatagtgaatatctcctttgatatgggcattagctactgctttaggtaagagttttaaacctgtagtcttagatactacacctgctgttaaatctcgatgtgttgtaaatgtttttgagtctttattggcattctcatttacaatctttttgtccttagctaacaatctgttaatagtcacattcacatctgtagtatcttttctatctcggtctctcgcactccgatattcaatatatgcagttgcaacatccttatacatagacttcattagctcaaactcaacaatgtcttgtaactcagatacagacatgctatcacaggctcctacgtgacgtttaagccctgcttctatcttagtggtaatcttatcagcaatctcctcaggattgtctctaagccccttagaagctcttaaaatagctctgtatactttattagtattatactttgtttctctgccatctcttttgatgactgtcaagtcgtttaataaccctaactcttgacccaatataatcaccctctcttttagcctagtaatattagtatagcacaactttaccaatagctaaaccataaaaaataagactatacactaagtagtagccttatctattttaaactttttagaacaacattttaatcacaataagtattaaccatacaatgatgaacacttttaatagtgatagcgttgtccatattagagttataactaatgcaattagaaaggcaggaatagctaagatagctaccaatactaacataccgactagaaatactaaacaacccattatttatcctccttagactccgataagatagctagatacatcttcatcgtgttttcttgtatttttgtgctaaacttagcatactctcttggcgtttctgctagctcagctatgaccttagcattaagggtggacaacaacactagaacttctgtaggtgacccttcaattctagtagttatcttgtcgtctacacccctttgaataccaagggaacttttactaaacatagttatcccctaactagtttagacactaagctcatatctacagattcacctgcaaaaattttcttagcttctttcatggaagagccaatacttgttttgtctacagataaaaggttatgcttgcttaggatatttttaatatcttcttccgacaacttctcaggaaggagagatgttaaataattgataactgcttcgttatcatcacctacaggagtaccttttgtaaactccaacgattgtttttgttccttaatttcagactcaatagctttttgaacctgttcgtccgaaagttcatccacggtcttaacttttacttcgacacgctttttgtctagcttagacataacaaagtcaattgcggttaactttgtcttgtctcctgccttacgagcatttagtttttcttgctttaactttgatagcatagattttctcccctttggttattttacttttttagctgtaactttcagatactctttttactagtatcctttaagtacatgttataaatttttggtgcatcttccttaaatgctttagaatcgaaagttgtcccaactgatttaggtacaatagtaaaggttccatactcatttttaacagagtccatccctagttttttgattcctttaagaacaacttctttaatagcttcttgtttctctttgattaacttagccactcggtctaactcagcatagtcctgcatgtagtccttgaagccctctaaggataagttctccgtatctaaagatggcgctacaacaaacatatcttgtggcgttggcttgcttacgggtggtgtgtaaccttgtggtggaacatacccaccttgtaaattagttttaatatccattgtttgtttcctccttaagtttatattagtagtatatcattaaatagctcctgtgtcaacaccaaaatagaataaaagtaatgctcctagtaatagtaaagcacttatagtgcaagcaatgtattctcctcggtctaaagaatcctgatatggtattgcaggaacatccattcctgattttgccataaatttcatcatataatggttagcgttcttctcaaagtgagttcctagcagtatgagtaagtaataaactagaaccactagtaaaataattagtagccccatattactcccctttctttaataactcatcggcacttacaccaaagaattgtgctagtttcattttattttttgccttaggaacttttgtccctgattcccaataagatagcgtagagaaatttacatccaattcccttgctaaatctcgcagagatagatttcgttttttctctatactcttttaatcgcaaatgttcagtcatcaaatttacccccatcttaacataagtattattgttcttgtcgtagcctaagatgtaccacctaacgttagataactctatccaactatcaccttcaaactcccaataaggtggctctactcgaaatataggatgtgcctgaattactacagtgtactccccttccaaagtaggtataccaaatgaagataggtcagctatagtatcttgatacgtccccatagaaaaatcttcatccaacatagccaactcaccgaataaacaatcctcgaactctgcactttcatcccactgcttgtgtattacttgtaagtctaggacatcctgatattcttctgtattaatcatatcatagataagctcaatattccagttatcacttgaaacatagtccgctttaggattgaatagtgtcgaatgcactagtgattcaataaaagacaacttctccatatcattagctcctttcctttacaaaataagtatagcatgaatacataaataagtcaacacataattataaaaaaaagacccgaaggtctaatttttataaacaacttttaacgaagtcatacttctcgctgtttagaacctctagcatcatagcttcaggtgaaacgatgtctgcacctaatacttgacggaagatgtttggagttaagcctgatactagcgctactcctcgttcgtcatgacgaactggtgtattgttttgacgactgtctacgttccaaaacaccacgtcaggtaacttgtatcctgcacgttcgaattttgctttcgcattttcaaagttagtgatgtctgcaccacgcatacaacggttaaattccatatcagaaacgataattaacttacttggtaagtcttcctgtttcatgttatgtttaactgctgtttttaagattaagtcaaacgctttttcaaggtttgtactcatatcccaatcagcatggtaagctttacgagcacggtcacgcaatgtttgattcgatggtacatgaaccaagcttgggtttcctgagaatgtaatgaagtggtctttgtaagcacctttcaaacgttctgcacagtataaagctaatgatacagagacatccatagggtctcctgacattgaacctgatacgtctgccataacaatagcgtggtcttcaataccttctagaacattgtctagagatttccaagataactctaaaacttggtctacgttaggcgtatgccaaccgttaagttgataagctcgaataatctcgtatggtaacaagttcttcgcattcatcttaacttctcccgcttctacacggtctaagaatcgttggtatcgttcaggagtgtgtctacggaaagcttcacgatatttgaataatgcttttgaaggcaatttctcaaactcgatgttatcgtaatctttagatgcaagtttttgctctacgattccgatttctttacgtagtgaacttaaagttctacgatagctacctttgtcactatacttgatacctaggtcttccattaggctaaaacctacgtttctacgttctttgtttgctgtagatggacttggcaaccatttagctaacagagatacaggtttgcctttttcaagggctaacatatcttctgttaatgtttctttgattacagccacagtagctttacgaacgaccgtgttatttgttttaacagcatgttgataagctgatacaacatcatcccaacgaccgatgaaagcgatgtagtctacaaacttctctgcaacttctttatcattgtcagctaacgcatcgaatgaatttctgaaggcatcacgctcacctaagccacctaaacgaatgttccgtagatgcactaagttacgaagagctagctctttatcctcagaatacgcatctagaaataaactaggtacttcggctaaacgagtacgcatagcacctgcttgagcaaagaagtctaagttactgttcaaagttgaactgtacgttaaagctccgttttctgtgtgtgtttctgttgtgtcctgttttaaagcatctaaaaaattagtcatgttttcaccctcctaaaggcatttttttttaataaaaaaagtatgtcatatcattgtgatagacatacttaaataaagtcataatatcacaagaagctgttatacgtatgctaccattacaccactatcctcgtgaggataggtgggattcgaacccacaccttttgagtggaagtcaaagttgtatgttagttgtttgctgtgagcttctttatttctatttagttataattgctacaagagacatttatatacgtgctctaccaactgagctaccaaggacataacgtccctaggcaggactcgaacctgcgaccccgagcttaacaggctattatagtatttgctgtgagtctctttattttaacttagtaaataattgctacaagaaccgctacttacgtgtgctaccactacactactcccctgaaatagtattttgtatcgtacccttagggtaataggggagtcaggaatcgaacctgagccacgtcctcctgatggaatagtttaattgctgttgggttctttatttataaagatttgtttcaaatattaaaagcacaagaacgagatttagatttttattgtagtttcacgtcctacaaggatttacctataaaaccgttacgctgaccttaattgtgactacagggtaataggtcagtccctgtagctcctcttatcttcatctgtaagtttttatagttttttttgtaagtttgcagtgtcgttctttatattgcttttttcagtttaaacaagaagcgcagtcatagtctagtcttcagtattagatttttttgtgtgattgctgtaggcttctttatattttaattataccacatgtttgtgtgttttgtcaagagtatttacaaaaatctatatattatttttctcgtgccttaccacttggctactctgcttgtggcagaggagggattcgaaccctcgataacaagatttcctttaatatgcgtagtggctgttagattttttattattagaatactcctgttacagaaacagtgccgttgtttttcttagctacagattctagaacttgcatagctcgtacacgagtactttcacctgtcttaacaagcatcgacttaggtacggtcacgttacgtgttttaactacctctttacctcgcttgtttttagttgtatattttttccttaactgtagttgaagtttcaactacaccgtaaaaattcttttgccatgtgtatcatcctcctataagttaactataacatagttttcataacctgtcaagtactttatgctaatttttttatttttatgtgcttgacttaagtagatatgtgatttaggatgagcagaacgtccctttgatgagataattccccatacataattttgatattgtctgcgttgcaatccctttttgcaatagtccattagctttcatgttcattctcctttgtatttgttatttgattacatacttagtatagcatgtatataatctactgtcaatactttttttaaacttttttgttaaaagtttacaacttaggcgggaatcgaacctacacgctgttctagctaggaacatctctaccaagagactaagctacagaggttgggaacccctcgggcatgtcatacaccccgagcacagtacctctttttaacctaatgtaaggactgcttagcacagcaaccctgacctatctccccgtcttcgtgctaagttcgagaagtgcttccaataagctttggtgtcatttcaccttctattgataccatctgcgactagacctcttcgaataggcggtagtgacagataataaaggatggtcaatccgtatacaggtggtgggattcgaacccacatgtcacaaaggacacaggtttttaagacctgagcgtataccagttccgccacacccgcatgattaccccatcatagccattaataatgggtgataaggcaatagttcttttgttagttgagcattaagctcttcaagctcctctaaggatagcttaagtaattcctccaccatagtaacctcctataaagagaatagcctaccgatgtcactaggtgtatgcccatcgtactcaggagcatattctagctcgggaacatcgaataagtcccaatgttctagcttgtagtggtaactgtactgaccttcaggtgtttcaacccctacaataaacatatcattatcaccaaacattgtgccatcatggtgttttttagctttccaagcaacatctttatgttcgttaaacactatactagagagaaccatcctatgaaaatatagctcatcaaacgtatggtaaccatctgaaatatcttttacagtaccacctgattctttaactgcattgatattgtcttgtgcgttttttaatctcaagaaattagtagttaatattgacattttcatcctcctagatactaattataagggctttgttgggaattgaacccaaacctgtgcacaagtactaccaccaaaggataaacaccttatctagaaaaatgttcattgcctgatagtccaaagccatgtatggagcagaggggagtcgaaccctatagctccacttgtgctatattaacagtataccataagttaggagtgttgtcaatatgacacaaggaatttatttaataaaaaataatgttaacgataaagcttacattggtcaatctaaaaatatcgaaagacgttggatagaccataagagtaccgctaatagtaactcaaatgaacgtagaaactatcctctatatcgtgctatgaataagtatggggtagagaatttcagcttttctattttagaagaagtagatgactacgaccaactaaatagtatcgaaaataaatatattgctgagtttaactctatagctagagggtataatcagatgattacctctatgcacggcttatccaaagaagaacttatagctaaaagagagctaaagtatcctgttacgagagataaactacgtagtgagttattacagtatagctttgagaaagtcggttctatctatggtgtgtctagtaacactataagaaagtggtgtaaagactacggcataccaagttcagctaaggactatatgtctgagtctaaatctttagcttacagcaacaagatgaaaaatattgctagggaatcatctacagtcactaaaagagtagctatgctagataaaacgacaaatactgttttgagagaatttaactctctgaacgaagcttctaaatacgtagggacaacacctaataatattgctagagctatccacggatacgaaggtagaaatacttcattgggttataaatgggcattcataaagtagaatgcctatggaactggtgggagtcgaacccacgtgttacctacttacttctccaagtcttctacaagttttttgcataccgtaatttttacttggaacctctagctaggtatgcgtgcgttatgcttactagagtatgccccaccttgtttgctctcccaacacgtacaaggttatgtgttagtgtatcctgcctctttttgactaaggagcttccgcaggctcatatccccttagtatacgtgtactgagcctaaactaggctacagctaataattcgttgtttgcagttatgtttagtttacgtttaagcacgtctgctacttgaacttgaagccctcaatagatagtcgataccaagaacagccccgtaatatattttatttgcctctcggctaaaaagattgagggattcgaacccttcgcaattaggggctatgtcctccccaattagtcaccaagaccagtcaatcttttcaaatccagtggacgggtctcgaacccgtttactacgttccacagacgtatgcctcaaccagtttggcttccacagggatgcttgacctccacctaagcgcttagagtagaggcacttatgtcgtttactcttacaacaaccaagatagtgtattcacccctcaacacacagaacgtgaccattgctatcagactttttctaggtcaataggggcagatgggctcgaaccaccgacctatgcgttatcaacacattgctctaccaactgagctataccccccaagaggtgtactactaattatttactacagcccgtttctgcatgaggggtctgtttcccaaagtttacattgtctgcatgatatagtaaaccctcgaaaattctttgtcgaacagcatatgactagcagtactatggacaaggcaggtttcgaacctgctaccgccccgttatgagcggggtgctctacctagtgagctacatgtccgtaatcgagctatgataactcgactagtgctattatttcatttgtagtatctacaacacctaaaatatgaggttctagttcaactaagcctccgcctaaggaacctaacgcctccgcaaaggactgtaagaacattagatattcaaaaggatgtccactattaaagttggttactcctttatgagtgaagtgacgttcatggctactccactcagtaggagtggttaatcttgcttgagtataaaaattaaatttcatagtggttcctccttatctatatatacatattaccatgtattagaaagtttgtcaacacttttttgaattaatttttaaatttttccaagcatttcattactttcttttgtaatagcttctttaatcaatagtgcaatagcaccattgtgtttgtttactgcggaaagcacatcggtatctgaatgtgttgtcacaacctcagctagatactctttcacaatatcttgcttaagagcaatcatgatagctccaatgtttttgttctccaactcaaggtcaccatgagataacacattgcttaaacgactatccgtaatataacgagatacatcttcaacgatagctaagaactcaggagagtattcaaccttttccttaaccttaactgtactcttagtaacttccgcaaactcttttgtcttatgtttaataccataaaatcggaagatgtcattaagtacatatcctttagtaggctgatatacttgaccctcactaataccaccgtagatagattgcacttctaagtgtccattaactagttcccgtaaagttttcttgtttgagacaggtgttaaatacttagcagggatatatttctccatcatgtcacgactaacaacataatgaattgtaccaccatcgtattccaagattacgttaaataatttaacgtctacttgcccttgcttgcacaactcgtagtccatacgttgaacttttcctccaaagtattccccaaaggcatgaacttgtgtgacaccttcccaatctaaaaatttatttagtgagtttaccagttcagctccttgttcagaaacccatgttttaaacccaccaaattgtttgtcatctaaagtaagaaatccgctacgtttagccaaaccaacctcttcagtacctttggctgtcacgatagagatgttggctccatgaattttctcagtagcgtaccatacatcatcgtacacatacggaatacgtctatctttacctaaagcgtaatgatttgttagcgatggatattttaaaaagttcatagtcagtcctcctataaattattagtttcgtgcaatgcttgcgttagcccacataatagtttgttctaagttggtaatagctaatgatttttctcggctatcagggcactcagaaccaataaggtaagctaattcttttgctttctcacgtaatgcggtatacttctcaggttgcccttctttgggtgcatgatacgtaaagatgttttcgatttgtttgtccatgttgactacctccttaaaaaattaagcacctaagtgctattatgtgtagggtaggaatcgaacctacgctctctccgtcagagaataccaataattctacctcttttcacaaggaagttcctacacggcggacggctccgctctaatgggcgcagagggattcgaacccccgaactctaaagagaacagatttacagtctgcctgctttatccatcttgcatacacaccccttgtaacctaagtcccaactgttctcagagtgacaacttacgggcaccaactaaaagatgaagttgcggtttagtaactaccacttaggttaatggaacatatcggatttgaaccgatgaccccctacttgcaaggcaggtgctctcccactgagctaatatcccaacttgtgtatcttacacacccgtgcccccgtagagtaacacgtatcctcagtataccaaccacctcagatacacaatatgtacgttttatttctaggacaaaaacgtcaccgaaaaacctagctcctatcgtaacaaagccaacgccaaccgttatgagtttgtggtaggtgggtatgtaccacagatacaatttaccttttcctaaccctgaaaggtctcatgatacaatactattataaagggtcttaagttatacacgtccgagagcggtgtacagagcttaaaataccgacagggtgggattcgaacccacgcacgttttaccgcctagtagttttcaagactaccctctttaccgtttgagtacctgccgaacacatatgtatctcagctctcaacctaagttatgtttttgagctgttgttgttatgcaacttctaccaaacaccagtcaaaaaagcaccttaggacgaactctagacctattatgtaaggtaaagatacattaaaagataggagcttatcagcatcgtgataagatatttgcatcgctgtcggctacaacgaccccttctttatacagaaggtgggattcgaacccacacgcctttcggcatcgcagtctaagtgcgacaagtctaccagttccatcactcctgcgttaacactcccgacaggactcgaacctgtaacctttaccttagaagggttctgctctatccaattgagctacgggagcaaaaggcacttagtgccaaagtttagctcgcttttttcactgacttacgctttcgaggtcgcatacgtggatttttagataaatattcagtgaagtcgatatgttgcagtaaaggctctttaaccagctctttctttttagttgatactttcttagcttgtttagtttcagtcattgtgggttcctcctgagtttattttatgtatatactaacatagtacaagtcttttatgaggtagtgcttatactatgttagcagggcttgtcaagtaatttcttcaaaaagtacctcatacttttagctttatatacttgacatctacatatgacctgataggctaccctcggttcgcatttacagaggcggtgggtaacacgaatatatggactacaggagtcgaacctgcaccctttggttggaagccaaagatactacccttatactaagtccacatatcagcccattttactgagctgacttaaaggagaaatgtctatgctcacaactttttacagttgctatgcccaagaggagactcgaactcctgacaatccgcttacaaggcgggcgctctaccaactgagctacacgggcgtgaggcttacaaacttagtaagcctataccacttaaggtcagcgtttcgcagtaaccctaggcgatgtttgctatattttttcaaaggagaaagctacaaaactccgtgttgtacaatgccccttgatggaatcgaaccaccgacatctaccttgtaagggtagcgttctcccgctgaactaaaggggcgggtctcccttaactaaggtcaaggggaggttgtgaatcatcttttcctttattaacttggtcatagataccactagctacagtacctgctacgacacctgacagtgcgagctgtgctagggaagaacccaagtcaggcattagtagtcccatatacatgcttaagactacaccaacgcctacgctaacccaagagagccaacgattaggaataacattaggtgcttttaatgtttccactaataacataactagcgggctcatcgttaagcctacacctaatattgttgcgataacttgttccatttgctatgtgccttcttcctatagaatacagtaattgcgacattgctatgcgcctgacaggattcgaacctgtgaccctccgattaaaagtcggatgctctacacctttcggataaccaactgagctacaagcgcagatttatttttcaagataacctactcgaaaaaggatactaaccaaaaactaaaggtcttgactgacagatttgaactgcctgctccgtaatttcttacggtgtgttaccaaagccatacaccaactattcaagattattcatttgttaacttatgaattaagtataacacataatttaatatgtgtcaacacttttttaaagttgagatgattgcctaattatagctcctgataggcactcagtggtcacgagaatcattactttcataatgattagaccaatagctataaaatcatgtatactcaacctaacgctcagtacaggactcgaacccatattaccacgtccgtagcgtagtgtgctatccagttacaccaactaagcaaaaggaaagtaggggaattgaacccctagacgtttaaccgccactagtttagcaaactagctagacctaccaatagtcaagactttccatgagtaagttaatcagaagttaacctactaacttgttcaaaccatttgttccattttgtgtccactaaatccatagctgtttctagctcaagaggtacagcaaagggttggtcaataggtagctcgggagagtcaatacctacgttaatacagttagcttccctagcctcctgttcatggatgtgtccacaaatggagcgcattttacgtctgtactcacctaaacccataggatagtgcgttagatagtactgaacaccgttgcgcttaacaatagtcccaacttcatatacaacaaacttttctcgcccatcgggtagttgaaagttatgatttttaatatactttaggactttactaccatcatgattacctttaaataggtgtatttgaccttttatctgacaaagcagttcaaatactcttttaggtttgttgttcatcccaatatctccaagatgatatagttcatcggaattggtaaccacactgttaatagcagaaatgatatgttcattcatctcatccactgaagtgaattgctctctcgtacttacaaaaccatttgcaccacaaatgttattatggtcaaggtgccaatctgaagttatatactttttcatgttaccctcctagaatattttataaggtacaatagattctttaccatcaatgcactctactttatgaccatatatgttttccatattaggtagcataccatgcttcttagcattagtcaagtagtagtacatatttttcaaaccgattatattatctgtatgaaattgaacattttttatgttattttctaaactaacaagctctcgggttaaagtatacccgtccattacgtcttgacctaagtcatggtctaaggacagtaactccacctctgtattaggattctcagacaaccattgaatgaagtcttctcctgatgtgaaagctttatcataaacttcgggtgctaaccgtaagtcatctacgaatattttcattgttgacctcctaattaaaaatacaaagacatgagatttctcggatacagtgacccttaaagattttattccttaacagtgtataaccttactcccattcgggaactcagtctttgctaggcacctaattctcagggaagggttcgaacctccaatactcagagtcaaagtctgatgccttaccagtttggctacctgagagtaaccccatgaagcatcacgggggaactgtagtatgtccaacctgcgggtatgctccgctcttacttcgtaaagtaagcctcaatttatggggagaggaggaattgaaccaccgacctctagggtttcaatctagcgctctaaccaactgagctacctcccctaactaaaaacaggttctgtaggatttgaacccacaccaaacgggttggagccgtttatgctaccgttacaccaagaacctataactgaggagacagggctcgaacctgcgacaacacgattaacagtcgtgcgctctaccaactgagctacacctcaatgaacctagtttttcattaaccatatccgagaggtaactaggaaccttcgtatatagtaaacacacataccctcaacttgcttcctcttgggtatcttaacctgctaaggcttgacttaactatagcatactactttcttaaaagcaagaaaaagcgtaactttctgatagtgtaatatgtttattgcggtggtgggaattgaacccacatatccaagcttatgaggcttgcgagttaccagtactctacaccgcatcaataatatcaggaatattttataaggtatatgttactgcttagccactaagttctaggaaaggaatcgaaccttctaacatacagagcctgcacttatgcagtgagattacgaacacataagctccttaaaacatttgtatttactgccttattggtttctcactaccctagacagacctatggtttatactccattcaatacaatagcgtggacgggagtcgaacccgcaatcgcccgatagaaagtcgagtgccttaccagtttggctaccacgccatattgtgatgtattaggttattgacgagccacatctaacaaatccctgttctcactgcttacacagtagtctccacaggcaaaccgaacattaaggctcttgaggtagtttttcctatctagcttccatgcacgttcactagacccgtcataggggttgtcagcaacaatgtaagttgtttacctctatcggaaagacaggacttgaacctgcgacccctgcatcccaaatgcagtactctaccaaactgagctactttccgttatctacatacaaaacccgctatgtatgtcctgttgggagtactaaaaccaacatttttcacctataatagacgtttagactataatctattaataatcagtcaggatttgagtcctacttaagaagtcactcctaagatagctcatttattttacggtcgcaacgggggtcgaacccgcatgttcacaccgtgacaaggtggtgggactgcctttgccctatacgaccattaggagagagctaagtgttatcttagctctatgaaaaaaaacaggtagtagtgattactacataaactataatatcatgtatttatgtagatgtcaatacttttttaaaatatttttaaagggataggtggggttcgaacccacgataacggttttgcagaccgttcccttaaccgcttgggtactaccccgcaattacttacggacgtaccacttcataaagtcttgatattcttcttctactttagggtcgtaatacccccaccatttactagactggtaaccatcgtggtagaacttatagttgtcagcaacccaagaaaaattttctattcttcggtaagacttacttttaccaaaagttgcatcatcaagctctcctctattaagcctacgtctgaatctcctattatatactttcttgtattctttaagagatgagtggctactacatacgggatggtgcttataactacgagacatatgcttacctcctatcgttgactttaaaaaagggtacaaaaataggtagcacccttaagtactacctgttgactggttgtgaaagctaaaaagcttacgtcaacagatagcgtgagggcagactgtgccccacgggttatcttgaataaaggggttacgccccgcagtatttgtatttttaagttgttcttcattgagtttatacatggttagtaaccacctttcttttattttatatttataatatagcacatacttgtatgattgtcaatacaaagtttattaatctttcaaataaggaggagctaggggggaaccctagcccacatgaactaataaactatagaggaaacggactggtatttcctctacaaattaattataccacactttttccttatttgaaacaacaaagtttaatttccgtattggttatatatatccgtgggtgtagctacagtttcgtttatccaagcggagtctaaaccataggaatctataccatagtgaacatctaacaaacgttcatagcctaacatagcatatacactagcttgggcatagtggtcatcacctttacgagtaatcgtttggtagaactgaccttcactattgtcgtcctcttggtctctaattaccacatttttccaatgttctacatagaaatcaagttcacggtctcgttgggaataaacaccaatttgtccctctttaagcttagtaatatatcgtttattttgagttagcttatcggcagaaacaatatttccgttgatgttccatgttggcttaacttgacctgtacttttaggtgttgaaggatatttacatccaaatacaacatcttgaccaaagtaatcaatcaatttagctagtttttcccctgagtctccaatatcagcaactataatgtcaggtctatacggtgtcagctctaaaattattttctctacatccgcacctacagcacgagcatctaccacgtcaggtttaataacgttaaacagacgaattaaatctacctgtccgttaggtttaaccccatgaatagttacccaatgaatgttaccccaatctatacctaccgaaataaaggaatagtctccccgattaaataaaggtttctctaagtaagaacgtttgttgctataaatatcatctgcggataccattaattttgtatctgcgtatggatacccgagcgtatagttatagaacgcttgttttgatatagactctaattcttttcttttaagactgtctgccgttacccaaacagcattcatctgtgaaatcatgtatccacgagtacctagaccacctttagtacggtcagggaatttaggaacccaatgtccattataccatctatctaacggttgcccacatttttgacatacgaattggaaggaaccatcaactacggttttagctaccacatcaatacctttaggggtttacacataaaatgttccccctacgttcaataggagcctcagcttgatattcgtcatacttcatctcattgtagtgtccacatttttcacacttgtgtaaataccagtactggtctgaacggtcaaatagtctatggattcccatatcaggggcactaggagtactccacctagtcacaatttgatacttagaacttgacatagattccaaagcagaagcctcagcaaaggcatttacacggtcatactcatccattgataaatagtcaatatccacaccctctaccgcactaggttttgaacttgtacggaaatataagaagctatttcttattttcttagcttcgagggagttaattttagggtcaacaatagtactatagtatccacgctctaacacagggtctaaacgagtctgtacaaactttttcatttgactgtgtgtggggaatgtatataaacatttaactgcatcgtaactatgcgtgtccgcaaaatgaattaagttacctacacccatttcagaaagtccaagctgacgtgacttgataattgcccgagttctatgagtgtcatttataatctgtacttgccaaggtctgtgtgcttgggctttttcttgatttcttcctgatatagcaaaagttatcgggtgactacgcaccgtgtgattctttaataaatacgttgatggttgcatctggtctaacaaatagctcaactggtctttggttggtgtatctgtaccaaaggtttgtcgagccatgttagctagatgagaccctagctctctatttgtcatttaaaaggtcgcctcattttcttggttataacctatctctctttctcgtagaagtttttctatatcttcatcgggtagcgcttcgagttcagaaaggtcaataacctctttttcttctccatctacaagttctgtcttaggagttaatgctcggtctagtatctcagactgttttaaacttacagcaggtggtgctcctgtgcctcctgtattgccgttagaccaactgttaaggtctcctgccatactgataacccgaaccaaatcaggtacgtcagtaagctctacagagcctgattggacatttgccaagaacttcttaactaacaaagtacttgcttcatttattgtatctaaaagctcttcactactagatttaggagcctttttcttttcaagcttttttcttatgttgtcagcagtattactcattattttcctcctccgcccctatatttgcatagcaagaacgtatatctgcacagatgttcacagtggcaatacttgatagtctacagctcaaatggttgcataccactgaagtagtgcagttatcaggaacaaaacttgttaagtttctatgacaaaccccgcagattctaacacctgtgatacgtttatctcccacgtatatcttgttaacactagtagcagaacgcattatagcacttctgttctctttaatctcttctcgtgtaaggtcttttgtgtgtgccatttaattcctgcaactccctcacatcatttttttaacttgctgatgtcttctgattgagaagctacgttcttgtaaacctgcctatcaacctttttcatcacaatacggtcatacatagtagatgctgaccatgaggcaattataccgcctgtcatgtatgttaaggctacatggggtgtgacttctagccatacaccgccgaagtaagctaaaaccaaaacaaatagactgaatgttacaactaccaatgattttaatactaaatgtcgattaaaaaacttcatacatatcctccttataaaaatgctctatatacttaatttagcacacatcttactgaggataatttttcccgccacttatactatattataaatagctttactaggaggtgtgccaacttatgagtttagttgcgattgcaatattatgtgtgtttctcatacaactggtgtgctattggacaacgagtaagattgtgcctaaactagttctgtcacttcaacaaggagaagtatcatcaatcgtagccaatgttttttatattggtgttatgttcttcttgagcgtgtccagtatcggaatgctcttagctatgcgatatgtacaccttatatttatcacttgtagtatagcaataattatacttgtaactgttgctaatttcgtttctgaagggggtgaatgataccatgttcaatatgcctttcaaaagagtcaagcaccacaaacagatagtgctgagcttgaatacgaagacttacttaaggtcgagttcctagacatgattgataaatttcagcaagacagaacagtattccacatctacgctataggtcgatgtgcaacaacagccacactcgtaggtttctcatataactacaaagttaaacagagaaatcatgagaactacatcttgaaaaccattgacttaaaggagtatgggaaactagaatttgaaatcaagtcgggagaaaactacggaacaattgtgaccaaaaacagacaagccattgttcagaatttgatagataattttcccactcaaactaaagttacgagtttttctaactccaatatgaattaggaggatagtacatggaaaatttatcaacaacagacttagttcgtagaatatcaacactagaagaaaaagtgcaatcaggcgctttaacttcagataagaactttgttaacctagatgctgaacgtagagaactgtctattgctataaatgagctaaagtctatcgttcaaagtctagataaagaaactgcaatacaggctgagaagcaatcacacttgtactatcaaatcacacagttagaaaaaactgttgagagtatgaagggagacgatgttaaggaagtagacagaaaaaaagatttagtagaaaaaatcttcatggcaatcctaggagcatctgtcacttatatcttcagtctgctaaaacaaaagtaatatgatatactataagtataccacaaaaggaaggggttagctagtaaaaatgagtataaacgaaaatgcaatcaaagtcgtaatctctgatggttcagaagcttacgtatttgccgataagagaggtggagttactactcctgaatctagattagcaagtgccaaagcgggaacaggaaatggctttgttaatgtcaagctaggtaaagatagaaattctgaatctgactatgtgaacattgaccatattgttcgttatagtcctgttgggttaccaataccaactgagatagaaaatctgtataaggctcctgagaaagaaactgacgaagaagctaaaatcagaacagataaaatcaaagaatactataaccaaatctaaggagcccgagtcggcttctttttttattctcaattttttcccctcgtaagtttatataagtttatataagggtttaattagtatataaaagaaagataataagagacccaaaaagtttaaataggaaacaaagtcaacacgcccctcgtaagtttatataagtttatatatgtttattaaaagggtatatatataaaaagataataagagacccaaaaagtttaaataggaaacaaagtcaacaaagtcacttaagaggtttttgtgctataatattaatgaggaggtatttactaatgaacattgagacttcagaaaatataattgctagtaatattaacatgtcagtagactttatttctagtttagcaaaaatggatatacaagatttagattctgttagaaaagctaataaagagttatcttcagaatttgattacttagtaaaggaacttggttataaagatttttatgagttgtgtttaggttctctatcagtagagcaaacttctaaaggtgggaacaaagacttctctaggttaacagcagtagaacaaaccgtagtcagaaatggtaaacctactaaaatgaaaatttatgtagacaaagataaaaaagaagaagattcagaagggaatgacctagataaggaaactccttcagaaggaaaacaacctgtaagagcttctgaccttactagagactactcttttggtgatttaaactcaaaaacaacacctaaaaaggttttagatatatctagtgaattaaccgattgggaagatagtcaggatttttcaagtgaatctactgattatttagaaggtcgagatgaaaatggaatactaaggtttttaacaggtatcagcaaggtaggtaaatttattcaagtagactttatcatatctgatggtacagtagggggttactggttaacttccctttatgaaacacttaaattagctttagacaataaactaggaattaaatttcctgatttaggtgtgaaagctttatatatgttatcactagagtataatatgcaacttaaaggtaaatacctagttgcaacttttgaggagttaaaacaggcagtaggggatttctaatgtttttgctacctgtggatataacagttatagtcatttgcatagctgtagcagtttatgcaatatttctgatattccttataaacacagaaaagaaaacactacctagcagggagttgctagatataatacacagtatgagtgatataataacaggaggatataaaatggaaacaaaagatactaacttaaacgaatttgtgattggagaaacagtatataaaattgaggataacaagttaaacttggaagacttggtacttcagaacgacaacgaggaagattatgaagactacttaactgtagttacaaatctattaagagaacgttatgagaagtttagatttttacgtatctcacctacgcatggtgattacaactcaggttatttcttgtcatttaccattactagagaacaagtacctgtagagtatgagtacttattccgattagctgttagtaaagggttaactgatagcaaaattaatgacctattttacaaagctgtcaaatcaggtaaggtgttacctcttggggatgtagagattgtcgtaggaacaggtatctcacctgttacccaagcagatgacttaatggctaacattgtatttatgccacgagactactatgaaaaacatctagagcttaaagagaaggctgaaactgatggaaccaattaatacaagcaagcttgttactaaagaggctatcaataaacctacgtatgagagctctttagttcaaggacttattggaattgctatcaatccttatgaaagaaagattgacaggcatattcagatggctttaccaaatagtttggctactacagaaggaacagaagcttatgagtttcttaagaaagcaggcaaactaaaaagaacacctgaagcaggagttgttgtgactttatctaaagggcaacagtttatcagtacgaaaacaggtaaaaaagaaacaaccttattacttgactttgagtataaggaagctatgaatatagatgttgtaaaaaagattatggaaatctaaactaaaaagctcttgtgctatattaagatagcataggagtttttgtcgtttctatgtactaagcatgttagggggcgttaactagaatgacaaaacagcaagacttcttgaacaagatacgttcaggagcagagaacacatgggtaacttttaaaatactaccttctctagtcggtgcacaagcagttttagaaagtggttggggagaaagttctctagctacagaagcaaacaatttgtttggtgttaaagctagtggtgactggaagggtgaagtttataaagtacccacaaaagaatttttgaatggttcttgggtgacaatagatgctaactttagaaaatataagagttgggcagatagcgtaactgaccacggaaacttctttacagagagtgattttaggaaaaacaactataaacaccttattggagagactgattacaaaaaggcagttcatgctatattaccacctgtagctacttatggttatgcaactgaccctaactacgctaccaagataattaatattatcgaagaacatagattatacgaatgggacactatcgcaacaggcaaagaaaataataaggaggacaacaaagtgagttatactgttaaaaaacaaattcgtgcaggacttcctcaagtaggggtaacaccttaccgacaagttcacgcacacagtacgggtaacccaaactcaacagctcagaacgaagcagattacatgggtcgtaaaaacatcaacgaaggtttttacacacatgtggtaggtaacggtatcgttattcaaactgctaatgtaaatcgtggagcatatgatgttggtggcggatggaacgctgaaggttatgcaagtgttgaattgattgagtcacataaatcaaaagcagagtttgaacgtgactacaagatttatgtggagttactaagagacttagctaaacaaggtggaatcccattaacactggattcaagtgctctagcaggaattaaaacacataactactgcacacataaccaaccaaacaatggctcagaccatatcgacccaatcccttacttaactaaatggggtgtgtcacaagcacaatttgctaaagacttagcaaacggtgtcggtactggtggaaatccaacaccaaatcctacacctgctcaaaaaactgtaactatagctaaacatgctacacattacagcccaagtagtaaaggtgctaagatttctgattgggtaaaaggtagtaccttcgcagttaaagaagaaagagccatcaaatactcaaactctaatcgtgaatatctaatcactaacaaaggagttccattaggttgggtactttctcaagatattgttggaggttataatgcagggaacaaacctgcacccgcacctgcaccaagcaacacaggtaaatggattgcggagaacggaacatttgttccaaaaatgacactaccactgacagttgatgcttcaggtaatggagctttaatcgcaaacattggagcaggtcaagctattaagtataatgcttacatgattgacagcaaatacgtttggattcgtcaaccaagaggtaatggctacggatacatggctacaggtaacgctaaaaacggtaaacgtgtagactattggggtagctttagttaagcattagagagggtttatgaccctcttttttgtttgctgtaatatttctgaaatattacttaatgttgttgttacacaaataccctacgtgtgtaacatctaactgctatattaagatatgtcatcacgacaagacaaaccaaaaataagaaaaggtggaaaaataacttatgatgaagaaagctattggagcattagtactagctagtacgattggagtcttagcactaggaacgacaacagcaaaagcagaggaagttaaggaaaacgacaacacttattatgtagtcgagtcaggggacactctatctaaaatcgcagataaatacggagtgaattttgaagcaattcatggtaacaacacagatactattgaacatgcagacttaatcttcggaggtcaaaaactactagtgggtggtaaagacttcgatgttaataaactagaaacatacggaacggcagttactgttgcagttgctgagcaacccgtagcgacagaaccagttcaagaagcagttgtagaacaatcacaacctgtagaacaagctcaagctgtagaatctactgtagtggcttcagatgataactggcataaagctaacagacgtatggttgaatcaacaaacaactataatacctttacaggtaatggatacttaggagcatatcagtttgccccaagtacatggaacagcattgcttcacgtcatggtttagatgcaagtgatttctcacctgctaaccaagaccgtatggcagacatctacgctaacgaacgttatggtggttggtctaacgtacctactactggtggatggtaatagaataaaaaccttagagagtagaccttcaaaagaggtctacttttttgtgctatattatttatatatgggtatttaggagggtgttaatatgttaccagtgacaatgatgttagcgttatgtgggatgctaacatattttattgtgtcttacatcttgatacttggtattgagaagaaacctgataaatttttttggagtaaaatgtggtataatagtattaggcatagtttgcatgtttattatatttagagacatggcaagccccatattccaagaactcgcaggtatctacagtagaccttctgaaataggcataacagttaagatactaattatctatttatctagttgtgtattcgggtatattggacaaagaaaagaaataaaggagtaggatacatggcatatgtaacagatgagctgtgggttgaagctaaacaagtagctaaggctaacggaatggctaacaattgggttgaaatagtagaatactatcacagtctcggaggacatagagcaatggttcactctatcatagcagacaaacaaagagaaattttgcatgttctagatgacgagtctgttcttctgatagacagtaggtctaatttacacattgcagactataatgatgtcttagaaagcaaaaagttatttttttataaaaaagtagacaattatgagaccttagaattgactatcccacaaagcttaacgtaccaaggaaataatatcataaaagtaaaggtggtgtgaacgtttggcaaattggtttgaaaaagcaagaatggtaggtattgaagagtacagcagtgaacctaccaccgtaatagatgcaggagataactaccaagtagctattagaaaagctaaagctagccgtgaaatggttcagaaaggcttgtcaggtaaagaggtagcatactctgaacctttgattgactcaatgagtatgaacccttacttcaagattaaaccttctattagaaactctcaagaactgcatacagtattaaagaggtttagcaagaatattatcttgaactcaattattaatatacgttctaaccaagtatctttatattgtaaacctgtacgatattcagataaaggtttaggttacgagattaggttgaaagattctgatttagaaccgactaaagaacaacaagaaacaatgcgtgagattgaggacttcttaaataatacaggagatacgaaagatgttactagagattcattcttaacatttgtcaaaaaaattcgttcgtgacacttatgtatatgaccaagtaaactttgagaaggtatttgaccgtagaggtaaatttaaacgatttacaatggtagacccatcaactattttctttgctacagacggtagaggtaaattgattaaaaatggggaacgatacgtacaagttatcgaccgaagagttgtagctaagtttcaagcaaaagaaatggcatttgctgttcgtaaccctcgttcagatattgaagttgcaggatatggattctcagaaacagaaattgcacttaaacagtttattgcacaagagaacactgagatatttaatgatagattcttttcacatggaggaactacaagaggggtattacaccttaaggtaggacagaatcaatctcaacaagcgttagatatttttagacgtgaatggaagagttcattatcaggtattaacggttcatggcagataccagttatctctgctgaagatgtgaaatttgtaaatatgacaccttctgctagagacatggaatttgaaaagtggttaacataccttattaatgtaatttgtgcggtatttgttattgaccctgctgaaataaacttccctaataacggaggggtatcaagtagtaagggtggttctcttaacgaaggtaactccaaacagaaaaaccaagcatctcaaaataaaggtttaatgcctttgctagagtttattgctgatacaatcaatagatttgttgttgatgagtttggtgacgaatacatgttcgtgtttgttggtggagatacagagactgagttagaaaaactagaaatcttaaaagagaaagttaagattaacatgactattaacgaatctcgtgcgttggaaggtaaagaccctatcgaaggtggagatattatcttggatggtgtattcgtacaatctaaaggtcaagcaattcaacaacgtaatgttgaaaaacaagaacaacaagctaagctttcacggatattggataatgtatcaaaccctgagttcagctcagacgttgaggaagatgcagtttcattccaagatgttcaagaaggtcaaggcgggttagcaggaaatactgatagcgttaatggaaagggttcttataacaaagaggtcggtaaagacggtcaaagtaagaatgcaccaaatgctaattcaggaaaagcataaatctaaattatagcacaaagtaaatgctttaacaactttgtgctatattatagtcagatgtggtataataataatgtaccacctaaacaacatcataggcaggtggtaagatataagatggaagctttaatggaacgaaaggttaatgtgtttgttcctatcgaccttgaaaactcattcaaaaagtctgagaccgcagaagacggtaagggttggtatgtgcaaggatttgcctcaacacctgatttagatttgcaaaacgatatagttagtcctaacggaattgacatttcttattttaaagagtatggatggataaattacgaacataaacaagatgcagaatttatcataggtgctcctacagagaactgttatgtagactttgaaaaaggtttattcgtagaggcaaaactatatgcagataattcttatgctaaagctatgtggaaactagcacacagtattaagaaatcaggagatgacaggtgcttaggtttttctatcgagggtgctattgttagcagagatacacaagatgaccgagtaatcactagtcttgttgttcgtaacgtagccttaacaacacatcctgcaaatcctcatgcaacttgggaaactctagttaagtcatggacaacaggacatggaacttcacctgagacacaaacaaatgcaggagcacttagaaaagaagagattgtaggagctatcacgacacttagtcatgtttatgctattaccgattctgagttgattgataaaacttgggacgatgttagtaaatacctagctgaaaatgagcaggtagataaacaggtagcaacaatacttttacaactaagtagaggtatatctaagcaacaagcaacagattttttaaataaggaaaggggttaaacatagtggcaaaagacattatcaaaagttttgacgaagaaatcgaaaaaaacgaagaactattaaagtctgctaaggaagctgaagtagctaaatcagaagatactgaaaaagctgtagaagatacagaaacagagaaatctgaaaaaggtactgaggacgaagcagaaaagtctgataaagaagaagctgaaaaatcagaggatgaagctgaaaaatctgaagacgaagctgaaaaatcagacaaagaggatgacgaggaagcagagaaatctgtagcaaaatcagataaagaggatgctaaagaagacgaagctgaaaagtctgatgaagaagacaaagaagacaaagaggaaaaagcagagaaatccgcagacttcgatgttgaaggtcttttgaatgtagtacttaaatcatactctcaattatcagcacaagttgcaacattaacaactgagcttactgcaatcaaaggttcacaagaaacaattagtaaatctttggatagcatgaaagtaacacctattcaggaagctactatgaaatctgtcgatgctgtagaagcagaacctgagggcaaagctgtaggttatatggagaaatctagcactattgacgatgacttcgaagacttagaaaaatcagctcataatgtagacagcgctcctgtaactgcaccaacaatgggagaagttgaaacaatgttcaaatctaaatttgaagaagcaagcaagagcgtagctagtgcacgagatgaaaatgcactacgtgaaatcactaaatcttggcaacgttatatcaatgaccgtgcaacatcaacggacactgagcgcttgaacaacttcttaaacggaaaataattagtttttctactaattactgacactttttagaagtgagtgctatattatagacagagaattaaatgagagctaacaatccccctagtgcctccgctaggttagctctttattaggagatataaacgaatgaaaggtgaataagcttaaatggaaaacgaaaaaaatacagtagatgtaagcaaagttgaaaagtctgctaagctatctgatgctcaagagcaagctgttaaaggttttacaactggttacggtattactcctgaaactcaattagatgcaggagctttaagacgtgagttcttacaatcagacttagttatgcaaacttggactcaggaggatttatctttctatagagacgtaacacgtactcctgttcaatcaacagttgttaaatacgatgtgtacttagcacacggacgtgtaggttctgcattgttcacaaacgaaattggtgtatctgaagttaatgacccatcaatccgtcaaagaacagtaaacatgaagtatctatcagatactaaaaacatctcaattgctacaacattggttaacaacattgaagacccattggaaatccttactgaggatgcagtggctacaattgcgaaaactattgagtgggcatcattctatggagatggagatttatcagacgatactcaacctgatacaggtttagagttcaacggtttggctaaacttatcgacaaagataacgtgttagacttacgaggagaaaaattaacagaggaagcgctaaacaaagcttcagtaattgttgctaaaggttttggtcgccctacagatgcttatatgccaatcggtgtacacgcagacttcgtaaacactttactaggacgacaagttcaagtaatgcaaaacaacggacaaaacgtaactactggttacaacgttcaaggatttaactcagctcgtggatatatccgtttacacggttctacagtaatggagttagacaacatcttgaacccatacgaaccattacgtcaaaacgctccacaccctgctaaagttactgctacagtagaaacagctaaaggtggaaaattccgtaaacaagaaatcgacaaaggtttgctagaataccgtgtagtagttaatgctaacggagctaaatcagcaccttctgacattgttactgcaactgttgctaacgctacagacggagttaaattagaaattgatttaacatctatgtatgcacaacgtccacaatcagtatctatcttccgtaaaggtttagatacaaaccaattctacttaatcgaacgtattcctgcttctaaagcagttaacttcaagattgagtatgtagatgtgaacgaaaacatcgcagaaacagcggacatcttcatgggagaaatgagctcaacagttgttaacttgttcgagttacttccaatgttaagattaccattggctcgtactaacgctactgataccttcgcagttctatggtatggtgcattagccctacgtgctcctaagaaatgggttcgtatcaaaaacgttgcgtacatcgctacagacaacgtattcaacgaaattaaaccttaagcataaacacttaaggggaaaattgaataaagaatttaatagggaatggtcagaggctattccctatttttttttaaaaaataaactaaacttttatggaggaaaaatataatgttagtaaattacctgttatcaggaaagacagtagcaacaccttatggagttgtagtatttaatgctcagggagaaagcaatgacttgtccgaagcacaccaaaaagaacttgccagtaaggttatctcatacagctacgtagaggacaaaaaacaagcccctgagaagcctaaagaggaagataaggtaaatacacctgaaaaagaagaagctcctgtagaggctcctaaggacgttaaaaaggcacctgctaagaaagcgcctgttaaaaaaaactcctgctaaaaaagaaacaactaaaaaataatttataaaggtgataacatgatgaatcaacaaccaataggaacacatggtaaccctttaagagttaaacctgaggatgtaggtaaatataccttagctgattatggttggactcctgaggctcttaaaagctacatgtttggtgtccctgtaagagaccccgaaacggggcaagagatgagtgatacgtattatcagcattatttagaagtagcagtagctaaagctgaaaaggaattggatattgctatcttacctaggtttatccaaaatgaacatcatgactattattcatcggattttaactcttacatgtatacacatacgtacaaaagacctattctttatgtagatagttttacattagagatgagtggtagacaaatatacaactacaatcgagagtggtggagagtatatgggttagcagggcatattgaagttatgccaactgcattaatgcaatccgcaatgggcggtatgggttatgacatcggtgtttatggtatgcctatgtatgcggggttacctgttgtaggaaatcagcaaacatttgcgccacagatgatacacgtagattatgtagcaggattgttacctagggaacgtgcaggagtcagtaatgaatgggaagtacctgctgacttagagcaattagtacttaaatatgcactagttgaagtattccaacaatggggtcgtttaatcatcggtgcaggtattgcaggacgtactttaagtattgacggtatatctgaaacggttcaaacaacccaatcagcgatgtattcaggttcagccgccgatattcttttaatcaaagaagatattgctgacttagaagccaacctaaaatcgtacttcggaatgtcattcaacgtagtataacggaggtattctagtggaaaaaccaacaagattcgaaaagcaacctgagagccaagcccctgctaaacaaactagtggggcaaggcttgaatttgatacagtcagtatgcgtaagtttgtcacagatagaggtattgatgtcttatgggagcgttcatggtattgtacatgtagacataaagaaacattacaacctgacccatcatgccctatttgtttaggtaaaggagttgcatatgaccctgcggtaaaaacttcggtagctatccaaagccaagaaaaaggtatagtatctatggacttgggtctatatgactcaggaactgcgattggtactagtttcttaaatgaaccaatctcgtttagagatagattaaccgtacctgatgttaagatataccaatctatgatttttgatataaatgaaagaagactagaaaaaggtgtatatttatactatgatgtcaagcagataacgatggcaagaggtcagttacagggagaaaacggtgctaccttgactgagggtgaggactttgtgatggactatcaaaaaaaatattttctatccaaaagaacacttattaaataccaatgtttctttaaacattgaaactgtgttaagatatatagtaatagacttactaaaagagagtagataccaatacacggctaagaatagaggtcgtgataatgctatcttcgaagagttgccaagaaagctcttgcttaaaagagaagacatctttattaaccctgaaccattctcgttagaaagtaacacaaaagaggttgttaaggaagaagagtcagaaaacttaatgggggctaagagaaaaccaacaaataactcaggattcttcggtaagatataggaggtaattatgagtatacgacctaatttgtttactaatacagaacaggtcttgagaaacttaactgaggctgttatagaggataccttgcaagagggggctaactatgcctctgagcaaggtatgcaagttaagcggatgcctaagtatttagaagtaacagaacaacggatggctaaccaaggtattattgacttaaagccctactttgctaaatctcctaatagaaagattaacaaagaaggtaaatggtatatgtacgtgccaattagtataaaaacaagagacatgtctcgaagagcttatgatgaacttagagctcaacctacaccacaggttgcaggagctaagactaagctgtatacaaactatttgtatgatagaagacaagagagttctgcggtaccatcattgaactataaacctaggtcaaataatgtaactgcaatagataaaaaaatggggctcaggtactagaagagagtatattgcttttagaacagttaaccaagattctcctgcgaatagttggatagttaaccgaggaaaagctaacgaaaatgatttaagtaagacattgttagcaaatatggaacgacttatgaaatggaaacttaataacttgtaagggggattgaaatggtaccaagtattgacacgcatcttaaaaaagaagttacaaacatgttagacattatcttacacgagtgctatattatagatgaagttttaagagacttcgaccctgaggttgttaaaacttttaagacagcctactgtggagacagtaaggctaaaaacgaagttactgtacgatatagcttccctgacattaaaacaccataccttgcctcttatgtaatacagctaggtgatggactagagagtaaaaattctttaggtggtgttgaaggaacctttataaataaagaaaaaggttaccgaagtgaagacttggatgttaaagttgataacaatagactttatgttgaagcttccgaagagataggggaatatattagtagtagtgatgttgcctttgcagagtccgataatcttaagattgagggtaacagattatattttttctctcatgggtaatgagattttacttgatagagcaatcaatatcaaatactcatctaaataccctgctacggatggtgaagacccacacggaacttatcgagggttcacagcaagtgaaagtgtaagtattacttctttaagtaataatacagatactgttagatgcttagatgcaattctaaaagtcatattaattatgttacgacaatctgaccaagaacagaactactatagtctacaaaagactagattttctgcattagctcctgttataaatgacggggagactagagttatgggaagaaccgtaacgttaacttatacttcatcctactttgttgaatacaacgtagccaataatatcaaagagattatttttaggaggacaatgaaagatggcaaagagtaaaaaggagcaaccaactgaagaaaaaacacttcagtatgttcatatagacacattccttgatacagcgagaatactgtttacaatgagtgaggttcaagtacaaggttttagagcttacatggcaggtaatcactaccaaaaaggtgacgaagcttttgtaccatatttaaaaaaatatttaggaataggagactaaaaaatggcagtagaattatacccaatcaaaaaagtatctagacctcatactgagattaaaacagatacgagtggtatcggtggagcttcaagcggttccgttaaagtattaatgcttgtagggtctgctgaaggtgggaaaccaaatacagtttaccgagtacgtaactatatgcaagctaaacaagttttccgtggaggagaactattagatgcgattgagttagcatggaacccatcaacaaacacaggtcttaacaacgcaggtgacatcttagctatgcgtgttgaagatgctgaaaatgctaaattaaccgtagatgcaatgaccgtcaactcagaaatttatggtttagattctaatgatattcaagtagcgttagaagataataccttaacaggaactaaacgtttgacaattgcgttctctaaagacagatacagccaaacatttgataacctagggaaagtattctctgtagaatatcaaggtgaggaagcagaagcaacaatgagtatcgagctagattcaacaacaggtaaagcttcacagcttgtactacgtgcaggttctgacttagcaagtgttgaaggaaaagcaattggagatgcagaggtaggaacagataacactgtagcgcctaaagcaggtggaacagtaacatttgaaaaaacttatgacttgggtacaggggtttatgaagatactaatatccttattagtgacatcaacaacttacctgacttcacagctaagttcttccctatcggagacaaaaacttaccaacagacacattcgaaaaactagatgctgtagacatcaagaacaaaaaagatgttttcatcacagctctagcaggagatattcaaaaacaaactgcatacaacggttatgtatcatttgattttgaccctcaaaaagaagttacaaacttcccactaactaagttagcaggaggaagtaacggtactgttcctgagtcttgggcaaacaaattcaagaaatttgctaacgaaggtggttactacttagtaccattaacagctaaacctgcggttcatgcagaagctaatgcctttgtacaagatagaacagttaacggagagcctatgagagtattcgttggtggaggatttaaagaatctatcgaagaattaatctctagagcaactaacctacgtagtgaacgtgtagctttagtaggtgcttcaggtagccgtagaatggatgacggacgagttaaaaacctttcaggttatatgcttgcttctcaaatggcaggattggcttcaggggttgaggttgcagaacctattaccttcaaaccatttgctattgaccagttagatgtaatcttagaaggagctcagcttgaccaactaaacgaaagtggagttatcagcttagagttcgttcgtaacagcgatgttacaggtttccgtatcgtacagggtattactacttataacgataaaactgctcctgttaaaaacgaaattagcgtaggagaaggtcacgacttcttagtatcaaacctaaaaattaaattggataacaacttcatcggaactaaatctgttgaattgacaccttctctaatcaagaactttatccaatcattcttagatgataagaaacgtgtacgtgaaatcacaaattatgcacctgaggaagttcaagtagttattgatggagacgtagtgtttatctcattcacagttgtaccagtgagaggtattaacaaaatcgaagttacaatgacttaccaacaacaaatcttaacagcataatatctgtaggggctgtatagccccttagttttaaaaataataattaggagtgaaagcataaatggctagcgttattaatcaatccgtccacactggtaataccgtgtacctaatgattggaaacagaatcatcggtcgagcacagtcagctagtggtgagcgttcatacggaacacaaggtgtgtatgaaatcggttctatcatgcctcaagagcatgtttacttgaagtatgaaggaaacatcaacttagaacgtatgagaatgaaaaagaagacttggcaacattaggaattactgctctaggtgaagacatcctattacgtgatgtaatcgacatcgttatgatggacaacttagcaaaagcggttgttgtagcatatcgtggatgttcagccgtatcttacagtgaatcatttacagctaatgaaatcgtaactgaatcaacacaattcacttacttaacttcagcatctgttaacaacggtaagaacgcaggtacaagcgttatctaagactttttatccctgaggactcctcagggtttttttgtgttataatagagttgtagtatataaatagcgtacttctcacaactaagtactatattataaattgagaacataaaaactagggggataaaaatggataacaacgaaacattccaaaatgcggagattagagctttatttgaaaagcttgaccgtggagaaaaattgactgatgaggaagtaaacaagattaagtaccaccagtcagaagaagaaaaaacagcattagacaaaatcgttcgaggggttaatgacatttatgtccatgaatataactttgaagattatggtgggttaaaaattacagttaaaattaaagcacctaatgcaatcgaacaaggtaaaatcaatgcggttcgtgagaactttttaggtggtacaggtacaatggttaatacatttacctatgtagtttaccatacttttgctctattacaagtatgtggtattgatgtaccaaaagaaatcgaacctgaaaatgtgtataatatgaatattatttacaagataggagttgattttgccgattggctagaccgatttcaatattgatttaaaatctataggtggttcccgaagagttgcccgtagtacgggggtagggtactttggaacatcatgaaagagttcaaagtattacctacaaaccctgattttagggcactgacagaccgtcagattgagtttattgcatacagcatggagaaagatagagaagaaattgaacgtgcaagaagaggcggagtagccgattcagactaccaagactttgacgattcatggtggacagcagaacatgatgactttgtggctaaacgtgaagaccatgatgaagctgacattgctaatcaagttcaagctatgacaactcctgaagatatggctaaactaagagctcgttgggatgctagtgtagaggctgaaagtattgtagccaacggtggaacaactatagcagaagataacttaaatgaaatgatgaaaaataacttagatcgtgtgattaaagaagctaaagctcttgaagcagatggaattaataagtggggcgataaaactgatattgaaatcagtgaagaaaaccaagctcaacaactaggttatggtaaaatcactcaggaaagtattgacgaggctatttcaatattcgaaggtggagacgaaaactttgcacctgagactattatacctagcagggacgatgatttctatatttaaaaaataggggcgtaaagcccctttgaaagggagtgaaactttggaagaaaatatgtatcgttttggagtagatgccgacattggtagtgctactgagaaactgaataaaattgtagaacttatggataccattgatgggctaaacaaaaaaagggaaagataactacttccacagctctcaaaaggatatagataccaacgttaaagcaatgcaagaaatgattagactatctaaagagctagaaagacagcttcaaagtttaaaatcagttcaggcaagcaaaggtgattttggtggtatttctgccataaatgaccaaataaaaagtgtacaaaaaaacctagatgagactagaaataagttccaacaattaggggacaatagacagtctatgtcaggtcttaacagagagactgttaaggagcaacaaagatataacagtgagctacaagacgagattaaatacttgagagaagttaaaagtttaactagagacttaaatgcaacggagagacgtgtaaagtctaggtctaattcttactcttcagcaggtaaagctacttttaaccaagctaatgtacttcgtggagacatggatacattaagcacggcagggtcaatgagagaagataacgaactacgcattaatgatttaaacaaacaaattaatacgattgaccaagagttatctcaacttgctaaaaatactagtaaaactaaccaagagcgtataaacgaagagtctgcgttaaaaaactcaagaagagtgttagaggatactattaaagctttccaagaaatgaatacaaccattggtggttttgatgagactattaaacaaactgctaataaaatgaatgatgtaaaggttgatgctaaccctgaatcatttgcaggtcaagtagctagtcgttctaactctattggtattgctattatgggttctttaattggttcctttgcaggtatgtattctaaaggggctacggctaataaagctatgagagagccaagtatccgtgcaggacaagttacaggaaacagtgactttagagcagttcgtaaacaagcccaagaagcaggtatagaaaaaggtatcaattacaaaggtggagagatgcttgagttccaagatagtatcttatcatcaatgggattcaaaggtcaagaaagcctaaatgacactacacgtaccttagcagaaggttctagagctgttcctgtagataatgaaactctaagtaactttatggagagcaacatgcgaagtggtgcagtagattcagcaacacaagcaaaagcaatacaagaagctttcctaggggctatcgagcaaagtggtatggttggtcgtgaaaaagaacaactagatgcccttaatagtattagtagtcaagtctttgcaggtagaaacggaaacaacgatgagctga

SEQ ID NO: 2 - DNA, 147747 bp, Unknown
  Description of Unknown: VREML110-1 complete genome sequence
gctttcaaaacgggggctgattgcaaaaggcaaacgggggcgcatggtaaaaagcccctagcagatgaaacagtattgtaacataaaaccccttgacggtgtgggcggtgtatggtacacttaagggggacacacaaaactaataaggagatgtaagcatatgaacgaattagagttttcagatttttgggcactattgggggacgaaccgaccatcattgacaaggacacacgggaaacggtactcgaaaagaatttcatggattgggaagcgggcacacctatagaagagatttggggggacgtaagcagacactacaataaaccactcttagagatgttatacgggacggagtgacctaggagggtaaacagtaagggaaactattagaagggcttagagagcacgagagggggcttatagatggttatagatgtaattgtagggctttcaacttttgggggcgtgttggcggtgtttattcctatcagtttggcaatgaataaagagggggcggaatagttggcggttattggtttatggtttggcttattggtagtaatgtttttaattgtgtatattgcttataagattatccatcgcaatgataagggggaaagataatggaaagaatactagggaaactattaggcttattctttacaatagcactagtaaggtacaagaataaaacatacatgtatagcaagtttggactgacaaggaaggcaagggaaaaagctatatacaagacactacaagaagcaaaaagcgacttaaaggttaaatttgatattatcagactgacaacagttagtaaggttatagaagaaaatcgttcttatccatcgtttgcaagagaggttttaatacctaggctagcatttaagaatgcaaagtttctataaagcccctagaaagcccgtagcgaggttttacgggttaggggttataactatactaaaatacaaatagaaagcgggaggcgtttaatatgaagggaattagagaggttaacagcgttttatatcttaagagcggggaaacagtgcaaagggtatataagaacatacgggaagccgtggcacatgctagcaatcataggagaacggacgtaaaaagaagcattgtaaccgagaacgggcggacactatacgactttaaagggtaaaagtgttatttaattaaaatcatctctatggtatcgaccttatagcaacgggctttatagtctacacacacaagggcaaggagggcggaacgtttaaaaagttttgttattattgcatttatttaatcaaaagtgttgacactatgaaagccccatgctatactatgtatatagtaaagaaagggagatgttagcagatgaaaaaagttattaattggtcatatgaacaaggacaagaaagaattgagacgtataaacattttgggcatgagattacattagatgagagacccgctaaacagatacacatataccgagatggtaaatatatcggtacaatgaataagaaaggcatacaaggagggcacacactaagacaaaccatgcaagggaaacggttaaaaacttttatataaggggttgacactcagcccctttcatgatatactatgaatatagtaaggcgctagggttaaaccttagggaaaacgagtacagcgacttattaaaaaaagttaatcaaaagggttgacaagcaaaaacaatcatgctatactatgtatatactaaagaagaggagatgttttataatgacaaacacaacagcaaagaaacctaaatttttggtggtagacaatgccgacatggacatgtacgagttgggacgggtaaacactatgcgagaagtcaagaagctttgtaaggaacaggtagaagcaacagacggggaatgctatgtaatggtattaacactaaacgaggaaacaaacaaatataaacgttcatctgctactatcgtaacctattaaaaaaacttaataaaaggggttgacaaccttaaccccttttgttatacttaatacataataagaaatggagatgttaaacatggaaaaacaaattgattatcttacttattggactgacacactagcaagcaacgtgaaagagttgacacccgaggaactacactcagcaactagaatagaggaacgtatctctaaaacctacggaatcgacccacaagacaacaagccactattttccgaactgttagacactctagaagaactaaacgacacagcaaaggaaaccaactcagaagctttctataatacagtggaagctatcatctcattatgggacgagataaacgtaagaaactagtaaattaatttaataaaaggggttgacacttgacccctttcatgctatactatgtatatactaataaaggagatgttacaaatgcaaaactcaaacgaactattcaaaacattcattcttaacaacctagcactatctagacgggggcgatacctaaggaatttgcccaacaatccatatcgggctattacaaggcattaaaagaccttaacggggtagacaagctaacaaccttatataaagacctagcgggctacgtactagcaggcacacccaaccaacaaaagaatgcaagagacttactagagggaacgcttgacctttccaccgttttggataggttaggacgttagggaacgggggcaacccctcgaaacctttccaccttttgaaattggggcttgactttggggctatcctatgatatacttgaggatgaccccaccccgttgttttgtgaccgtactaagggggctatcccatatggggggtgggctcttggggttcatatttttgggcaaaattatttctaaaatatattagaagtcaacacccgtacccgtaaagtcaacaccctcatcgagaagtcaacacctaccctttgtatgtagaggctaggtgtattcgtctttacttgtgcatgtagcttatgcttggcaaccctacgctcacgtctatttatctctgctctatgcttcttgcgtataaggctatcaggaatgtctccccaataatagtactcatgcttaagtcgtgaagaaactctacgccacctattactaccactagttatcataaaccgcacacctcctagtattatctgacactattaatcgtccaagtcctccaccctatacatcatgtctcgatagttggctcctatggctctaagatacgcacgggctagctcaccgatagcactctccttaaggggcactggtgactctacaatgaagtacgttttgcgaccctcaccccatgtgtccatgtcatctcttgagtggctaatcttaatcttaagtttcatacattatcctcctcgactacatattgagttaccgttacttgttttggcacaacaacaataggttgagttagaatcgtaaagctatctaggtcatgtactccccatctttcaaacacttcacttctataaaacttaccattgtattcgataacaataagagcggtacatccccaatcatcttgttctaagtcttgctcatcaatacacccattgttaaaataatagtgtaaaaactcttcctttgtcaccttgtcatcccccttctatatttacagtataccacggactgatacacaagtcaacacctatctagtactttttagatagatgttgcacattgcgtggacagcaccaatacattcatttgttttggggtcataatacagatgaacagggtgctcaagcatctcaggtggatacattagcttattgtacttgtaattaacaatgtaaggcggaggagtcatagccaagaacttaccacaacaccaacacttatgcccttgctcttttaccatcttcatacgtagccaacgtctttgctttggagacatcaatttgtaatagtatttttgttcaaacatagtaccaccacactttcttcttactcatattaaagtctgaacttaccatcgtccacatagataatcaaggctttgcttgtagaccccccgtgagtaccccccatgaccaaatttaatgtccaatataacagtgtttgggtacttatttagccagtcacgtaagttagcttctataccgtcacctgtatcatagataacccttacttcaatatcattagccaacattttcattacatctattcctccgcttctataacatcgtctagcccatagtattcacaatactcttgccaaacatctaaatcatatcctgcatctttggcatctctgtaatcagcctctgagtaaggctttttaacttccccgctcataagccaaataccatagagtaatctacgtcaggtaaccctaaaatgattacatctttactttctgcccaaataaacaaatcaaatgtagagcacagaccatcaagaccttcacccataagacatgactcaatgacatctttgttgatagtggtgtccgttagactggcatacccatgacgtaggcggaagtagtattcatgaccctcagtgtcttcaaactccatttgtgtagggcatactgaacctaaatccatgaaagactcgatttcaataatagtgtatccgtttatttttttccatgtgcttatcctcctataaaatatgtttttatttagtccatagtacttgcagtaacctgtcaaaccaattaagacgacctaccttttcatctatataatctaccactaagggagaatcggaaggaacctctactacatcctcatagtgaacgaagagtctacccttatcgtagtctatattgcccttgttgtcagtataatggacaatataacagtcagagcgctcataattaagactaccatcgtaacctgttattacaaataaagtattttcttcacttgctcgttcagctacctctttggttagtttaatttttgtaccgatagataataaaatatctccttctgagttaaacattgttatcctcctatagaaaacatgtcattaactacttcttctgcgagctctgcaatatcattgtaggatgcacgttcgtactcctgaagagctcctgtatacggctgtgatacgtctaaatagtagttctccatctcaggcatcaacgcttcgaagagtttgtttacgagctcctgcttagtacctttaagggttaatacctcttggaactcagtggtagtcacctttacaggtagtacttcttttatgtcccctgaaatgtctgtccgaaacccctcaactctagttatagtacctttataaagagaacccttctccgctacgataacttcagcaaggtaatcttgagcattgtttacgagtactttagtgcttacagtatcgttattgttaaacttggacataaatagttctttattcatcgtcaacctcctcatctgaacttctgtcgaatagtcccaacatcaattcaggaaatacatacttagtgtgcactttaaaactaacttcatgaactccgtttacaaggtcactctgaacgctaacatcagtaacctctccatgacctagttgttgaactacttgagctaatgtaggtgggtcagtgacgattcttggtttaggtttactagaccttggcagtacttccttaacttctgtgtagtggacatatctttgcgtgtttcctcgacctaacacataatagtcagtgtaacctctattagcactcgtgtcgtagttaactatcgtaaatgtttgcctagcatccacacccatatgtttagctgattcttccgttaaacgaacttttgtatggataggtaataatgtgtctcctcttgaatttagcatattaatctcctcgtgtcatgttattaaagtcagagactacccttataacggaacgttcatgagttaataagcgctctgttactgtatatgtggtatcccctacctttattttgtcacccaccacaggaacgataggtagctttaacgggataatcttggttctcaacggataataaccaaactcataaacgagttctatctcatagtttaccatgttacttcccaccattcagaagtatggtttctagcgttcacagctctaactgagtacccatcggaggctaagacatcagcaaccccttgagtgaagccatcccgagcccaaagagtcacttcagtacgcttctcattgctagctacataaatttgatgatacgctttatttataatttttgctgttgtgggctgtacctcttccactcttaaacgagcttcttgaggcgtaattcgatgtatccctgtcttctctagcaatgtctttgaagacatttttgatagactgtcaaggggaataccttcttcctgaatggctttgtcttccttaagtacttcattttcaataataatttgttcctttttaccaaacatgtttttaaaccaattcattatgtgtacctccttctatttacctaagtataccactttgttgacgtgttgtcaacaaaagtagtcatacctagctgtccgtgagtatcctagcaagtttgggtaatcaatgttaggctcccctgtttcttctaagaaacggtacgcttcgtcaaggtagtatttctcatctgaatctattgggtatccgctatgctcatgattaatgacctctagataccgagcgtaagtaataggttcttttatagttaaacccaactccttagctctctttttagctgacttctgatttacattgtctgcaacaacaagggttgctccgttgatatgggctaacccaatcagtgcgctagttttccctgtatttctttttccttcgataattaacatattttacctctttccgcacttataatgtaagcgcttccttcatttgttttataacttttctactgctcaagctctctatagcctttactgtcccgtaagatatagctttctctcctgatagttcttccttaccacactcattggataacccaatcgcattgtgagggaataggtagctaccaaaagtagtatccccaacagggatgtccttaattattacagtttttgcagttttatacttttcgtaccttgctacctcgtcaggcaatactagctctagagcctcccaaacaatatctcttgcgaggtctctagtttttacatccaaagtttgtctttccctattttgttccgatagctcctctaactctttaactccaagagtaaacaaaggagtgatagtttttgccatatcaggtaattgctttgcccgatttattaacgactctttagtctctaaactgttcatggacagatacccctttcagctcaggtttaagcattgtccctgcatcaaatacatgtacatagttctttgaattacgaatatatacttgattagtgctatcatctcgtagctgaaattctgtagtctcaatagaatatacttctacctttcctgaataggggtcagccacttcaaggtaaccattgtgaatacctacaacaggtagccactcacttctaactttagcctcaatcatcctcttacctccttagataaagaacattactacccacccaacaagcataaatagcaacgttgatacagtagcttttgcaaatatcatccaaacggactcttctgtagttggggtagttttagctgtgataaagctaataaatacatctaacccaagcgcttgtgcccatgtaagtgttaacacgccaaaggttggagcaattaacccgttccacaagaacatcgtaacataccctccaatagcaaggctcaacaccattagaactaaagccccaaacaatttaccccatgcgcttgctaattcgtctcctgtattcttattcatcgttttcctccttaggtttaaatactcccacatctttgtagaaatcgtagtcttcttgatagtttgtttcaaagctcttcattacatttatcgcacgctccatgcaaccataccaaaacattctaccaacttctcctgttaaatatgtctcatccacctgtgtaggttccttttcggacatttcatccacaagggaatcaagaacatcagaaatgccttcaccgcccataatgaactgttctacaaccataataaacttctcgacctctgtacggctgtctacgggctcttcctcttcttgtggtacaagtaccatctctaagctgtacaaccctgtggcggtctctgtatagcttcctgtgagcatccatgtaaggtcattcacttcaaaggtcatgcccgatttataattcttcttgaggtcatctaatgtaatatcgaccaatagatatgctgttcttgtttccatcttagtaaatctcctttggaatactttgtgcgtatgtgacggtttgctccgtgttaacgagacggatacgagtagaatcaatagggtataggttagggaagcccccttcgtctataataaccacatgattatcttccacatagttaacgttaacccactcataacatatatatgcttgtaacatgatgttcccctttcttatattataccaaaaacgtaaacgcaagtcaacacctttttgctatactcctgaagcgttttcttgctcttgttctattaactcctccgctatatcattaaagaagtcatgcacattttcttctatgcaatcgacatttgaaagcatagcactttccgtactagggttgaatactacttgaactccatcccatgccatatctccaaagtcatcatagttatcttcaattagaccaaggattttctcattaagaggtagactttttaagtggtctagacgttttaaccgtttactttgtttatagcataggatacctaaggtaatagccacacaaagtagtgcagttattgccatatataaaactaacatacagtaaccccctaatctacgacaatgctatctacagttattgcccacatgtcagataatctcggtggggttcctagtgcctgctctgcttttttaatagcttctttttttagaagtggctctaactttgattggggtcgctctcttccagtcagtatagtaatatcctgtactatctttgcctgtagctctcatctcatacgtagctgaaggttcagtctccttatctaaatcaaaagaccaattggctaacaaaacttccatattagagtacccacacatacgaccatcactatctgatacccataataaacctctatcaactttggtagtaaagttataaaccttacctgttgtgaatcctctcgacccattctccccaataaatctagcttgtaacatattttctcctcctcacactatttcatagtctaatcgactaaagaaatagtaatcttgtactttatatagagcgttatcttgaaaaatttgtgcttccgctttgttctcggataacttatcccaatcacctgtaacatacttccaaggaacccaaggtttaaatagaggtttcaccaaaactcgtactttaggtgtcatattattcctcctcgttaggtacataggttgagtcgtaggataaatgtacccgtatccacatccaagcatcatacgcctctagccaatcacctttaaatagctgaatgttcatgttcttaaacaaaaaccataagagcttccagtcatgagacttaaaccctactattcttctactaatattaatcatctttagcctccaataccgtggtgactttcattccgtacagctcagcctctaatagaattacagttctatgaatagtatcattaaaaatattttgctttgtatatcctaatgattgccctacatatatatgaacatctccatgacccttaatgtagccttctttggattgttgctgattgaaccttgcatatatgtcatggatttccgatactgttttttgctcactaaacccttgcttatcattgggtaagataataaatagcctgccatcatctaagtgacaaatctgccctaacaactctgtattgtctaatatatctttttccataatatccccctcaaatacctaagtttaactgtgcttcaggacgagaaaacttttcaatttgagttaagattctaactgcttgagctccaccgccaaaaccgttatcaatgttaacaactgagatacctgaagtgcacgaagttaatgctgtatttagcgcagtatacccatcggaagatactccgtaccctgtagatgtaggtaccgcaataacaggtaggtctactaaacctgctaaaattacaggaagtgccccttcaaagccctgcacagatacaattgcgtggctttctttgatggcatcaacggattttaatgttttttgaatgtcatctacaccaatatcattaaaataaacaggcgtatacccacttaaaagtacagttaagccaacttcatctacaatatgacggtcggcaagacctgctgaagtgatggctactgataatgctgattttactggtctacgatagataaaagctgtttgactagacaaacagtaggtcaaagtagggattccacgaacattttttgcttgttctgcattatttacaataattttgtctgtattccacttaatatcatcgaatgtcttctttggtagccgagtaatcatgatattttcttcttcactagtagcttcaatctgttttttaatgtctgttgcgctcttatttcctccaaaaatggttcttaacttaacaaaactcatagtttttctccttaatatgctgtattttagataattataccactactttgtgctgttgtcaacactgttaatctaaataagacgtgtatccatagaacaacacagtttgcatagctgtgtagaaaggcattgtcacataaaccttgtctccatcgtataaaatgtgcccgtcttcgtgccactgctctaatatctccatttcagcaggctctaagttaactgcggggatagtattaccatttttgatagagtaatctacaaaaggtagtaaacgtagcttacgtacagttagtccttcccccataacagccttccatgttttctttaaatcatctgttaacattcctcgtgaagtttctacaatattcatttactttctcctttcaaccacgcactatcgttatccacaatgacatctcctgcacttgtaggtacaataaaagtcatgtcatcaaaatctccacttaaaagagacacacgaacgttatctaaatttttatatacctttaactcaccctcaataccaccaaagttaaacagcaggttttctgttcttaacacatctgttactttagttactgctgtatgagttactttagcttttttatacatgttaaccaccccaattgaaagttaaatctacaaaagcatctgacggtaaattatcttgctcatatagggtaaccttatacaagccttttttgtccacatccccctgcgttacctcttgatttagtttgaaatgtgggtcattctgctttgtgtagtagcatagtaaatcgtcaatacgataaattacagctaaatttccttcaacttgccacttagttgtgaccttttttgtgtcgtacattataatttacctccgtgcaaaattattttatctccgttaagctcgatagattgaaccttaacagagcttgaatgagtataatctacccctgtcctgtttcggtcttctatacttttaagcactgtgacgtggacttcaaccacgtcatcaggcatttgttttagtaactcaataatcatatctttattcatagttaccccccaaaaatatccatttttcttatgagtttcccattcatcctttgtgaaaactgtttgtacacgctctttactgccgtaacagtcggtggtaacgtcaacccacacaaaaggataatcatacttagctgtccattcttcttcataaggcttttcttcatgtatctctacaatatattgttctaatagattcatcgtatcctcctacttagccttgaagttatacacaggcttaacaattctgtcaatgtctacagtatcagtaatgatttccttaatttcttctgcatctttataagccttaggtgcttcatctaaagtactttggactacagaagtagtgtagattccttgcatagtatccttaaagtcttctaggctaagaacctctttagctttacttcgtgataaaactcgtcctgctccatgaggtgctgactcattccagtccttgttacctttaccaaccccaataatagagccttccttcatatttaaaggaattaccaaacgcaaacctttacgggcatcagtagcccctttacgaatggtattgttctcaatgtcgatgtagttatgaatagagtcaaatcggtcaatttctgtccaacccatccctttaagaatagtgtccacgattgcattacgattcattaccgcatattgttgtgttaactccatatcaataagatacttttctaagtcttcaccttcaaggtatggtagctgaggctttacattttgccgtttaaagcctgtgattgctgtttgaatctctttatgccgaccttgtgctttaagctcgctaatgagctctgagagccctttaacgtcattctcgtggtacaagtctgcaatatcttggtgatatttagctaccttaacacctaaacctcgggaacctgtatgaacaagcaaataatagttatcttcttcatctttacttagttcaataaaatggttgccaccacctagtgtccctacagagttcgcaatacgagctacaaactggtcttcataagctccttttacattaatagacttaagcatatgttctactgcataaaaaactgaactgctgataggcttactacgaacgtcaaatcctgaaggaacacccgtgttgattacattgtctagtttaccccactcacgagcatccgtatttttcaacttacctaaggaggaaaccataattccacaaccaatgtctactcctacgatagaagggactaccttagtgatagctttatcatagtgaatcgttgtacctactgtagaacctttaccataatgagcatcaggcataattctaacaataccaccttcagttacaggttcatttaacattgtaatgacctgaccgatagttacctcatctacagttttaataaacatctttgcttctgcatatttacctaacaactcaattgtattttttcatatttccactcctttataatttatacgcataaatatctaaaccttgacctcctgagatgtcttctaatatatttgagactatacgccaatctcctcctgctagcctacaccccataccataaggaacacctaccttacctgtatgtgccttagtctgagctagtgctgttgctagagcccaacttaaggcatcgtaatcagtctgtaaacctttaccatagttatattgcccgtataaattgacgattaactgtggtgtattggtataattactatttacaaaagcacctgaccatcgacctaaacggtctctacttccaataggaatatcataattaatatctgctagatatacctcaggatactctttggctatttgcttcgcaattcccgcacccatttttccaaaacaattagcttggtgcataatcattgtgcagtcactctttaacaaatctccttcaactataattaagctcaagttataacctcccttactatagtaatcataccatatatttgagcttaagtcaacacttttaaattaaaaaacctacacttttttgtgtaggtttctcaactgttattcgtcttcttctagtaagcctagctcttctaactggtgagtgatagagcacactgagcaggtacactcgtcataattttctgtagagataccttttaccacagggttctcatcttcagcaagggaagcaatgaagtcattggcaaactgcttaccaatttcgtaagctgttactagctgaatcatccccacctcttcttctgtaagaggagttttcccatcagctctttcagattcgatattgctaagaatttcttctttgctaaggatttcttctcgcatacggttcaagccacgtactgtgtttaagatagtatcgtgagtatatccttcgataacatcatccccgaaagtcaaaacaacacgttgttcagccccgccacctaacatagctaagaatgcttgcaaaccttccatcatttcttctgcttcgtcagttccttcaatacctagtagttgttctaatagttctttttccatgtttattagctcccttagtttatttttttattacatacatagtatatcatgtatactaattaatgtcaacactttttgttaattaaattcatttgcctctaagtagccatacccgtacaatgctacccctgtgaggactacccaaattattacaaagaatatggttcctactttaccgtcagaaatgttactttctacaaacttgtcataggcagtactctctacatatatttttctaccaaaggcagggctcaatcccttttctgaagcgttagctaggaaagttaactccatcttaacaggtaccccgtagtacttcactcgaacatctgaccttgggtgtctagttgtgatatgtgattcagggaatcctgaaaacttatcgtaatcataactgtggtcattaaacataatagttttagtagataaataatctgtatgataatgttcccattcccaataggtttctgttttcgtgtgagtgttaccttccgaatccgtgtacgttactacccgagtcttcataacatagtgctcttctcttcttttaagctcggcatacttaccatcaatttcagaaaactctacaggctgttctgcggtaaacaacccatgtgtgtagaatattccttgctgtgtatctaagatgtaatcgtaagagtctttgtcatccgcagggatagctgtctcatacatagtattattagctaacctagagtcttccatcttattatgaatccaaatacctgtcataatcataaaggctacgataactgtaggtagaataaagtatctaacctttaactcatcccgtctcatttattaaacaggtctgtatgacctgttgggttaacaggaatactcataacttcataatcttgtgtttcgtaaccctgtaaggacaataactttctatttacaaaggttctagtaaacttcttgtattcagcaacttgtcgattgtaggattttcggtgactcgcaacccgattttctgtgatgctgaactccttcatagcttgcttatagttatcttgtgacttaagctcaggatactgctcgactactacgtttaatgtactcttagctgaatctacgttaccactctctgcttgctgacgtgctttaactactaatgcaagagtctcttgttcatagttgttgtaactctcgatagaatccaccaagttagaaaataaatctactctgcgaacttcttccgcattcaaatctccttgggattgttcaatgttaatctcgtacttgatagctcgattctctacgttcttaaccccgaaaaaggttacaagacctaaaatgaataccacagctactgaaatgatagcaattttcgttttgtcaatgttctgcataatatctctccttatcgtttatacccatagtatatcatgtatttaatagggtgtcaacacttgtttaaaacattgggtcaaaaaagtcataatcataatcaaagctatcataaagcccaccgttgtagtcccaatcagagtcagggtcgttataatattgaaactctaatagagtttgtctttgttttttagaaattgtacgaacattctgatattgccaaataatacttttacatattgctagtatttctgcacctacataacctaactcggtataggttcctgcaccaatttctctatcccctctacaaacaagttcggcatctgaaagtgcctctaagtcttcccgtgtgaaagacatatgttttactcccataatagctcctcctatggtttaccgtttaatacccaatactcatgccagtcttttctaacataatcagttaaaaatttgtgccatttcaaactagctgtcattacctgattatcccacacatagttaaaagtaacaaatctaaatcgcataggttgtgcgtaaccattgcgactaagctcttcctgtgtaggaggaagctccccataagcgactgatatgacagttacttctgtaggaagcccacctttcttaggaataaatgttgctccttgaacatcagccaaggaatatctaccgttgtttatactcatctaaacttaacacctcccaatttatatcagagttaaacttaattaactgccagtctatctctgattgggtgatggcaaagttcttatcatcaataaaaacatctactcctagcttcctagggtcatttttgtaaacatcttgcaactcttttggattttcattaacatagtcaaatgtaatgtcgtggttttctaaaaactcaagagcatcacgtaaatcattacccgttcgacatgtccaaagaaccaaaactagacctttttcttttaagtgttcaatagtctttttagccataggtctaagttccccaattgcaggatactcagcaggctcagtaatagttccgtcaaagtcaatagctacatatcttaacttcatatatcacccttctttcttggtaataagccctgtgcttattctctttacttctagacccttttgcctagcatagttcacacaattagcagtcccgctcttagtcccacccccacacagcccaaagcacttgtgagttgtccacaatccactcatttctgttttgtagaacagcactaacgtcatgtgcaggtactgtgtctaaacctgacgtatttacctgcccatctgccatacttagtatcatgtcatacagtgttttactttcagctctccatctagaagattgattggcaaaaggtattgcacatattaacttaatacggtcatggtacacatcttttaattctaggcaagcaatagcatagatagtatctaccccaagtgccatgcctgatatgcacacaacttcgttatatttctttaataacttctctagttccaacttgagaacataggttaacattttgttctcaaaagcaaacgggtcataaccacccatgagcttgtgtggtctgtgtcccgttatgcctacaattattctattctccactaggtgtccctaacacagaggatagaggttttacttcaacccctaggtaagacaatggttccgactcttctaagcccttaacgatgaactcaaaagaagcttgctcaatgaactcaatgtctaccttgtcggttaaagggactctgagcataagcttaatagcatctttatgcaacaagtatctgaaagtcccttcagttatttttctagtagtattcttataatgaccaaaaagagcaaactctccatgaccatcttcagtataggataccttgagggctttacgtctatcaatctgaaagttgaagtcataggcgtttcctacttctaagtgggggttatctactttaaataaatagttaacccctgccttacctacatgaactttctgcaataaaatcaagtcattctcaggtacgatacccataataccactagctgtagtgataatactcaatctacttcactcctaatttatcaagttttttgttccattcgagtacacgtactcccgcaggaacttttacatctttctctccttcttctattttagcataatatgctcgaatgttccagtcatacatagctaaccatgcgtttacttggtataatacatcacgagccataaaccaaatattacctgaagttaagtttaagaaaaagttgatgaagttagatgagaaccaaaatgtccaagattctttaagtccaataatcattagaaactgtgctgttacactgattacaaatgttagtaaattacctaaccaaataagtaaacctaatgttcctgcaccttgaacaaacccgaatactccaccgaagaacacaagtaagattaacccgattacaatgaagatacctgtaaagattgtttgttctttcttcatagtaccaattttaactttacctgactcatctttaaacttggcatcattccatcgaactaaaccgattaagtgagtcaagccaaagtaagctcctgcaaataccatacccattgtgccaaagtaccaaaagattagcatttcaccgatgttagacaaaatacctaggatattacctaaggttccctctcggttagctaagaaaactacacaaggaactcctaaacaatatgctgtaataaagaacccaatttccgtccaagtgctagggtctgagatagctaccccgctccaattagtgatgaagaacccaataactaaccctacaagaatgatacctactacgtagatgttacgccaagaccctccttctagcgctactttattcataaagctgtaatacttatccttaaatgttggttgtacttctttcatatccattctcctattctgtaattaaatattttttttattttgtctgctgtttttagcatatcatcataatgttgttgtactaaaccattataatgagctatagcttcctcttttgttttaaatactgcaatatctctatggtacccttctgcttggtacttaatatcttttttgcctcggtcattagtgtacacaatgccctcaacaggttcaagcttagaatacggtttactacgggtcttattgacccgagtatactcggttatccacacagggtctcctacagtcattgtagctagttggtctctccaatacataaagtttactccttatctgctataaacttagcttctgccttatttacaatttcttgtaactccacaactgataaataatcgttgatatatccatcaataaccatcttgcatagctcataacgatttgcgtaatcagagtctttaatctcaacgtaagggatattatatctatgatacagctccttaagcagttcttggaatttctgacgtttagatggttctcccaccttacgcataccatcattaacccattttgtagagttatccaataagataactaagtctgaagggtctgcgataattaagtcttccacaatagcattttcctcgccctcataagtgattgaaaaggcttgtgtactgacatacttcgtgtctgtgatagcaaatcttgttgcattacgtttcgcaaacataacgtcttcatgatgagatatagcaatacgggtgtaatcataagattgtaaagcaagctcatctccaccaagctcatctttagcccataaacgaccacgctcccaaacagtcggtgttccataatagttacctagtttgtcaaccatgacagtttttccgctagattcaccgcctgatatttcaatcatagggcttaaaagctctttgctagcccgtggaaggtactcccaatatttgttagggtctttacggattttagttgcggacaccttagaacgctccctagcagggtcatataacgctacacccttacacccgaagtattttttatagttaatctcatcttgaggttcactactaaagaaaacggtgtcttcccacgcagtcttactaatcgctctttgcccttcgatagagacaccttccacagaagatacccctttctttactaagtcagaccaacttgcccaaccatcaggatacatagggcaatccgtttcatcaactaatacagcataaatgttaggttgttgctgaaatgttttctgaacaatcttaagtttatcgtactttgttagcttcttagttaaattggatgaagcgtataacgcatcagatacaatatcactatggctaataactacaataatttcttcagctttacccgatgcccactgaatcatgtccacatgccctctgtgtagagggtcaaacttacctactacaatacctctcttatacatactagccctccttgtcatgtaacttaggtttaccgtcactatctaccaacatagttatagtcaacatttccgagttgtaccctattttagggacatatgttacaatatactctacattagtgtctttgtcatatgcgtagtacgtatacacatagttatgatttgaaaactttatgagttcaaaagtaggtgcaaactttgtcaaagtctcctcttgagcccaaaatctgtctgcgccatcaccactgtcagagttgtcagatttgtcagagttgttaccacaacctgtaagcatcaatacccctaaaacaactgtcagtaatactactttaatattcttcactgagcacactccttcactttaattaaccctaatttataagctgtcatcacacagctagggcatagccgtgcgttatctgtaaacgattctacataaatagcttttttagttagtgcttctgctacgttattagccttaatgcctgcgttaccacagagactataatctctactagtatctctatcgaaagagatatgccaagtagcattagcactattctttaacctaaatatcttcattagctaaaacatcaactgctttcataaaagctagctgagctgacattgaattgataattccgttacgaataagctcttcaacatctgttgtcttcaatacacgaagctcaacatattcatcagcatcaaactcagtttcgataacagtgtcttcatcaatagggtctacataaaccatatacgcatgaatctgttctaaagtataccctagacttgcatatgcactaaatagatggataggttgagtgccttctgccatatggattcctaactcttcacgtagttctcgatggacagcagtcacatatgtcgggtcttcagggtcaatacgacctgcggggaagccaatttgtgttccgttaactacggtacgatattcctccccaagatacataagcttcccgtcttttgttacaggaacgataagtacagagtctccataagtaactacctgccgtttgatatggtctacttcgtctaaaccgtcaccaagaggtacacgcacctcaatgtctctttctacgacatcgaagacgacaccttcaaataatttcttctcttctagtactgaatattctttcttcattgttatcccccttacattattataataacttatattgatttaaaagtcaacactaaatattcatgttattaaaatttatttactaacgggttagtattaatactagccacaagagatgtaaatttaacatacatattattaaagtgctcgatgttgttaaaacttcccgctctaacatccaatttaaacactgtgtaaggtaccttgtatatcaattcgaaatctcctgagtcttggtgcaagataatatttatacctgtatcatcaatgtactgcttgccttgggtctgtggcaaagttgcccataagtcccaagtatagtgctcagtataatacttaatagcctcatccattgttaatctagttgccatcgccaacgacctcccattgttccataactgatttagggtcatctcctaatgtttgccaatgtgaaccatcatcgttaactcctgcaatagaaataccgaagctactaaaagtaaccttaccaatatctcctgacttcttgtgttgcactactttaccgatgagttcttttcgttcaggaaacttctcttttatcattccattattcgtcatgtatgctaaggtttcatgaatctgctcagcagtcagcccttttgtttcttctttctcgtgctttataaaataatctttagccatgtttaccctcctaaataaatatactctctatcctatatagagagtataccacgtattgtcaactaagtcaacatatatttttcaatttctatagtctttccctttaacagggattttttaacatcaataattctttgattacgacttcccctaaaaggtatggttaaatctcgttgttctaatataaacttaccgtcaacgagaacatcaaccatttctagtaactctaacttgtcaggagtccccgatagtaactcttcaaaagtatatcctgaccatgaccatacgtccttagtatcaccgaatttctctcgaacctttgatactaactgaatgcacaatcctgtgttcaagaacggttctccgcctaataaagtcagcccttgaacataatcattagataaatcttctagaatcctatcttcaagttctgctgtatagggttctccatagttaaaatcttgtattgccttattaaaacagcctttacagttaaataggcacccactaacataaatgctacaacgtacaccttctccgtctacaaacataaaaggtttatagtcagctacgtgccacttactatatttatctgctgtccatttttgttgtttattcaattaaatagcctcctgtactaaagtagtcacaggaactacttctaagggtttgtactcttttggcagatatttatttagggttttcattctagttgtagcttccgctttgttgttatataaccttgcatcacccaaacctgtactcatcgcatacaactctaaccctgtaatgtaataaaagtcattagccccttttattgcatatttacgacttctttgcaatacctagcgcctccttcgcaacaacatctgctcgttcattgtatacatgacctgtgtgcccgtctacctttataaactttaagtctatacctgattgaatacaatggtctacttgttgtttgtacatctttgctaaagggtctctagctttgaaagcgcctgtagcccatttaccaacacctacatagtcgtggcatataataagctctgtcaccttgttatcttttgcccactgaattgctaggagagctcccataatttcccctgcaatattccttttaggcgtgaaatcagggttatcaccgcttaggcttacttcgtctactattgcatcgttgtatacgatgatagcactcccactatatttagaaccattcccaaggttagagccatccacgtaagcataatacgtgtcaggctctccttcattataggttgtttcttgcaggtaactcgtagcagtgtttaaatctttaaaggatttgtactctgcattagggtaaccttcgatagcttcctttgcagtatcccaagaagtaaatattcctgtttttctacctttctttactgcatagtatttaatcttcatagttcacatcctcaggactcttgtcgaatctaaaacttttcaacctaccgaagcgtacattttctgtaccttgagcgttttggcttttctcactaaagtaatactcaacgactttacctctgtatttttctttgttgttccatatatcatctcgtaagctgtcactgattgccccacctactttagttgttccctctttatacgtaacaatcatcccacccaatgtgttctcgaacttagtaccttcttttcccttatagaagtctaagactacaccatcatttgagtataaaccttttacttttaacagattcttggttctcttggtttcatacttagcagaggaattattgacaataacaccttcactacctgcttctatcaacctgttagcaatagcgtagacctctgcaatatcgttacctcgatataaaacaggaacttttataatatgagtcgtatcagctatttcatccaactcttctcgtctttcagcataagatttagatgatatgccattgtaaaattcctgaacgggtagtaaatcaaacatatggaactctaaccctgttttgttatcattcttagaacggactacagattgtgttgccctaaacaggtcaccgctgtttaaaccttcagggttttccaataatagttcaccatcgtaaacataaccatctttgagattttccatctctttagccaactctttaagaccttcaatagggatacccttgcgagtataaaaagtcaataaagaattatttttgatagctacgcatcggataccatctaattttaatgttacaaccatttcagtaatgaactctaaagatttttcttttcgtaagtctttagctaacataacaccaaaatcagggcataaatctaacccttcttgcgcacacacttcgttaaataacttaatacctacccctaatgggacacctgtttttgttgcgatacttctaaccatattgatatacttactatcacagtcagctatcatatgttggattgtccgaatatctttatcatcacctacgcaatcagcgagaaatatcattaaccactctaagtcaggtatctcgatatactcgccttcttttactttcttatccaagcttttacgcccaagattagtaactatatacggatttaccaaaaatttaaccaaataatacaatataggttcttctttaaagtaacgagccatgatagctactttatcttttttacctgaatgggaggacagttcctcccacatttcccaaactttagctaaatcattattcatagttatcctccttagatagcaatttcgtatttataactagctaagggtttataccctgatagcgtagcatctgatagtttgttttttaaagaagttactcatatcaaagtcttcggggatattcaaagtaactacatcttggataccgaactgagctttcattttagggtctactattttagtgctgataaggtctaccatatacttggtgaactgctcctctaaagttgggatatgacgttcataaacgtgcatgttgtcaatattccagtgcattgttccaagctctaagcctacaaacttagctacatacgcatgaagaacatggtactggtaaacattgaatgggagacctaaacaaaagtctgcgctacgttgcttaacatgcaggttaagctttcctccgtaaactgtccaatgagttgaccatacacaaggctctaacgccatgtcatctaagtcatcaacatcccacaaagttgtcataattcttcgagagctagggctatgaacaagctcatgtaacacatactcaacttgattcagggaagtatcacaattatcccaatttgcaatctctaaaggaatatttcgtgtcttgttggctaactgccacccataagcctttccaattgttccatcagggcgctcccactcatcccatatatgaacattacgttctttaagccatgaaaccttattagacatttcttgccaaatccactgtagttcaatcaaaggagacttaacaggaactcgttttgaggttaaaataggaactcccatatcaggggttatctcaaaggatactccctcgatagacttagtaatagccttctccccatctgcatacacagcacgaacagactcaatatcttcctgttgcttaccttcttttaataattttgtacctagctccatgtataaatcatcaaatgttctcattacttcctcctacatagttgtctaaacgtctactttggacatctgacatatattttttattttctctcaaccaatcaagagactcaccacttagagtacgtccttgtcggttaatcacagaaatagtgtcatatggggctataggtgactgaccatgagagaagaagaatatcatctgttcaatgtcttcagaagctaacttgctgtaggaatccaacacctcgtcaggatatttacctctaagtgtttgaataagcttgtgatgcttcccatataaacaaggatagaagataccatcatacattaaaatgcctgtaagcccttctccttgcgttctaggttcgtcttctgactccataatctctactacatcaaagtcattgtacccaccaacagagttgatatttactgatttaccttctcggatagctttctcataaatagacattcgtttagtctcacgtttatgcttctctaccatacgaggggttcctctaaccataagagcctccatgatgttcccaccaagttctttgaataaatctacataatagtcttcatcttcaaaaaacatctcaggtgtgacatgtcgccaccaaccctcaccaaacctaccccatacaggtgttggcttcttaaaaaactcttctttagaagagttccagtattcatcagggttttgtcgtaggtactcttcacgagttttcttttctaatttctctgcatccctaatgtcttttactcctgctagtgttactttaagtgcttcgatatttgttgatggaatatgccgtaatacatcaacatataaatctgaaatattctcatcaaaagtctttgcaataatcggaagcatctcctcagcatcctcttttttagtaaaagtaaacatcaacactgaatctgctcctgttgctcttgtagccttaactacataacgctcagcccatagtcccattattagttcctccttagtttttagaaaatttgtcaatcgctatcttagtgcttattacagcacctgcttccgcactgttggcaaaaggtacttctttgatggagacttcctcccctaacatttctgatattactgctacatgagtttccgcaactgcatagtcgaatgtagctaacggatacttttcatgaagaactacaaatgctacagcttccataaatacctcctaaaaaaatatactctgtatcttacaatacaaagtatatcatgttttcgtgtttaagtcaacacttatttattaaattatcaactaacaagaaatccatgtcagttacaggctctacggtacctaataagtatccattacctacttgagaaaagaagtcgtggttacttgtcgtagtagataacccgtttataactactgagttaacatcggatgctgtggtcgggaacaaaggagataaacctaaattatccattgctttgtttaagttatactctagaaatctctccacatcagaaacccaaccattgtagctatataagtctcgggtatacgctacttcattgtcccacaagtcaaaggcaatgttaacaacccaattctttagctcctcttgctcttctactggtaaggcttcaagacctttacggaacttatacccaatataggttccatgaacagtctcatcacgaataattaatttgattacctctgctgtatttgtcatttttgcttgtccaaggtagtacagaggggtatagaaacctgagtagaataggaaactttctaataaaactgagatagctttcttttgcaaaggagtacctgttttatatatttcctctaccttattagctttatactgcaagtgtttgttagtagaaatccactcgaaaatactatctatttctgtcggactgttaaaagtactaaaaatagttgagtagcttttagcatgtacagactccataaaaataatgttatttagcacagcttcttcatggggtgttactgcatcgttaagtaaggattcaacccctacttctgactgtaaggtatctagtaaagttaaacccccaaagaccttgttgataaggtctttctcttgagggcttagtttattccaatcattaatgtcattagctacaggaacccgagtatcaagccaaaactgctctgttaacttagtccatgttgctttgtcaattacatcgtctattctattccagttaattgctttcatagtatcctcctaaatagtacagctttcacattgtgcaatcccaacttcttggtcatcatccgtaaaagtacgtacatagtatattgttttaataccttttttccatgcgtagtgtcgtaataatgtcaaatctcgtgtagacattttaccacccttaggaagccaaggatacaaaccttcgggtatagctgaccgcataaatagagttaagctcatcccttggtcaatatgtttctgagcgtttgcatagatgttaataacgtctagcatagaaatatcatacgcactcttatagtatggtaaagtctcattagatagtctaggtgcaggatagtatacggaaccaattttaccttcttgtcttttctctacaagagaagtgattggatgcaaggatgcactagtttcattcacataagagatagagccgttaggtgcaactgctagtctattttggtgatatagtcctgagctcatgatgctgtgttttaattcaatccagtcctctttagtagggatatggtgattcttgaatatatcattcacctgtaaatagcttgggaaataatcatagtcatcattaatgtattttttcaaagtaagttccatctgcataggtagatttctcaaacccttcaaaagaaactccacgttcttgtgcgattttattgcttgctttaagtgtataatagttcatcatcataaagaaaatgtctgtaaattgtaacgattcaggagaaccataatgaatctgattggtagcaaataatgtgtgtaaccccataccacctaaaccgattgtatgtgctttatcattaccattacgcactgtcggaacttcaccaatactagaagtatctgtaataaaggttaaagctctaactgctgtttcaatagacttttcaattgatggagaagtttctaacatgttaggtatgttaatcgagcctaagttacagctaatatcagtacctaactcagtatatacttgctcttcgtttaacacagacggttgctgaggttgaagaatctctgaacataggttgctcataataatttttccgcctacagggttagctcggttagctgtatctacattcataatgtaagggtatcccgactcttgttgtagtttttcctatctctgcatctaggtctcgtgcttttactacagtactacgaatatcaggatttttaatcatgttttcatactcttctgtgatgtcaatgaacgagaaaggaaccccgtaagctttactagcatcataaggtgagaataggtgcatcataccatcttgctctacaagttcataaaacttatcaggaactacgagacctaaggatagcatcttaacttgcttagctgattctgcattttcttttcttgtagcaaggaaatcaatcacatccgcatggaaaatgtttaagtatactgcccctgccccttgacgttgacctaattgattagcatagcggaaactatcttctaaaagcttcatgataggcactacaccactactagcattatcaatgttcttgatagggtctccaagagctctgatatttgagaggttaatacctacaccaccacctagcttagatagttgtagtgcgctgttaacagtacgcccgattgagttcatgtcatcctctacttgtaataagaaacatgatacaaactcaccacggtttttacgacctgcatttaagtaagtaggtgtagcaggttgataacggttgttaataagttcatccgctaagtctaccgctagttgttcatctccgtctgccatcattaaagcgttaaacgcaatacggtcttcataacgctctagataacgttctccatcacttgtcttcattgcgtattgtgtataaaatttataggctcccataaaagattgaaaccgaaagtttttatcatatatacgcttaaacaactttttcgtgaatttaaagctatatttatctaaaattgttttatcaatataattttcactggttaaataatctaatttctcttttagcgtatggaaaaacacagtatttctattaacatgttcaataaaataagctttaacagcctctttatctttatgcaatggaatagtatcattttcaggtatgttgacctgattgtttaactcaaagtacgtagtcatttaatgtcccccaaaatcttgtttatttttttctatatcttcatccgttcctgagtattcgaaggaatacaacagcggtacactatactcttttgcaatgtcctttgccgtaaatacatataagtcagcaaagtttaaattgccactacccatcacccctttaaaattgcttaaatcattgttttcaataaaatcatttataggctctgtaaggtctctttcatatgtgggtgctactacgataaaaggttcgtttatagataagaaagggtttgcagggtctatctctacacttggtagagatagcttatctacaaaccgcttaacattgcctgtaatactgtaataggcaataatcaactatactgccaacttagctaattttgcaggttggaaccctgagaaaggttctcctactggtgggactacgaaaggtgcacccatagcgcctttagcaattgcttcatcccgaaattcggggtttaagtcaatacgtttttcttcgtaagctacccccaatttgtctagttctttcttagtgaacgtacattgtccacaatttgcttttgagtatactacaacttttcccataatatttacttcacctttcattatatgttatcatatttttatttgtttgtcaagagttaaacatgcttaactcgtgcatcaatttctttcttacgaccataggcattaggtctagcttgtggttgccctaaataaccgcactgtcttttaactacatctacagtcttagggtctgagttttcacaggtagggcatttgtatcctatctctgtaggctcaaactctccctcaaagccacataaatgacatttatctataggagtattcgtacctaaataacctattttatcataagaatagtcccatacttgctctagggctttagtattccatgtcattacaggatactcacaataatggataaaccctcctgaacagaattgaggataatctttttcaaaatcaatcttttcaaatggggtaggactcttacgtacatcatagtgaaaactatttgtgtagtaatctttatctgttacgtccttaacttcaccatatttttctttatccatgctacagaatcggtcagtcaaactttccgcaggagtagagtatacagagaaccatacaccatacttattactcaactctaaagctctagttttcatcttactcataatttctagtgtaaagtctttagcttcagtgttaccttcccactctccaccataaaatacagttgctacctcatagagcccaatgtagcccatagatatagtagccctcaggttttcaaagacttccctaaccgaatcttcactagataaacgtttaccaaaagcaccatatttataaagaataggtgccatatcagggctagcattttcgataacatgtttcattctaaatactaaggcttcctgaacgatagctaatctctcttcaaataactcccaaaaagcttctttatccccgttggactctaatgcaattcgtggtaagttcaaagtcactacgcctaaattcattcgaccatcagcgacctcgttaccattttcatcctgccaaccttgtaagaatgaacgacaacccataggtgatttatacgagccagtcaactcaactagtttgtcatagttaagaatatcaggatacattcgtttagttgcacattctagagctaactgcttaatatcatagttagggtctgtagggtagaaattaaccccttttttaattcccataactaatttaggaaaaatagcagtacgaccttctttacctaaacctttaatacgaacttgtaaaatagctttttgtatttcacgttcccaaatacctgtacctaacccaaaattcaaggtatagaatggtgtctgaccgttagaggagaacaaggtatttatctcgtattcatgagcttgcatagcatcataaatatcttttctagttaatctttgtgcctcttctaccacatgactaacatccgctattttttgattctcattaggaaaagcaaaagataataattgcccataatgtttattataattcatctctgcatatttagcaagaacttcatccgctctattgaaagagcatccgccgtactgacttgaggcaacattggcaataatttgagatacctgagccattgcagtatttatactttttgggctttcaacttcagcatttccgatagtgaaaccattttctaacatgcctttaaagtctatcaaacaacagtttgtcataggactataaggttggtaatctaagtcgtggtagtgaatatcccccttgatgtgggcattagctactgctttaggtaagagttttaaacctgtagtcttagatactacacctgctgttaaatctcgatgtgttgtaaatgttttcgagtctttattggcattctcatttacaatctttttgtccttagctaacaatctgttaatagtcacattcacatctgtagtatcttttctatctcggtctcttgcactccgatattcgatatatgcagttgcgacatccttatacatagacttcattagctcaaactcaacaatgtcttgtaactcagatacagacatgctatcacaggctcctacgtgacgtttaagccctgcttctatcttagtggtaatcttatcagcaatctcctcaggattgtctctaagccccttagaagctcttagaatagctctgtacactttattagtattatactttgtttctctgccatctcttttgatgactgtcaagtcgtttaataaccctaactcttgacccaatataatcaccctctcttttagcctagtaatattagtatagcacaactttaccaatagctaaaccataaaaaataagactatacactaagtagtagccttatctattttaaactttttagaacaacattttaatcacaataagtattaaccatacaatgatgaacacttttaatagtgatagtgttgtccatattagagttataactaacgcaattagaaaggcaggaatagctaagatagctaccaatactaacataccgactagaaatactaaacaacccattatttatcctccttagactccgataagatagctagatacatcttcatcgtgttttcttgtatttttgtgctaaacttagcatactctcttggcgtttctgctagctcagctatgaccttagcattaagggtggacaacaacactagaacctctgtaggtgacccttcaattctagtagttatcttgtcgtctacacccctttgaataccaagggaacttttactaaacatagttatcccctaactagtttagacactaagctcatatctacagattcacctgcaaaaaattttcttagcttctttcatggaagagccaatacttgttttgtctacagataaaaggttatgcttgcttaggatatttttaatatcttcttcagacaacttctcaggaagaagagaggttaaataattgataactgcttcgttatcatcacctacaggagtaccttttgtaaactccaacgattgtttttgttccttaatttcagactcgatagctttttgaacctgttcgtccgaaagttcatccacggtcttaacttttacttcgacacgctttttgtctagcttagacataacaaagtcaattgcggttaactttgtcttgtctcctgccttacgagcatttaattttttctttcttcaactttgctagcatagattttctcccctttggttattttacttttttagctgtaactttcagatactctttttactagtatcctttaagtacatgttataaatttttggtgcatcttccttaaatgctttggaatcgaaagttgtcccaactgatttaggcacaatagtaaaggttccgtactcatttttaacagaatccatccctagttttttgattcctttaaggacaacttctttaatagcttcttgtttctctttgattaacttagcaactcggtctaactcagcgtagtcctgcatgtagtctttgaagccttctaaggataagttctccgtatctaaagatggcgctacaacaaacatatcttgtggcgttggcttgctcacgggtggtgtgtaaccttgtggtggaacatacccaccttgtaaattagttttaatatccattgtttgtttcctccttaagtttatattagtagtatatcattaaatagctcctgtgtcaacaccaaaatagaataaaagtaatgctcctagtagtagtaaagcacttatagtgcaagcaatgtattctcctcggtctaaagaatcctgatatggtattgtaggaacatccattcctgattttgccataaatttcatcatataatggttagcgttcttctcaaagtgagttcctagcagtatgagtaagtaataaactagaaccactagtaaaataattagtagccccatgttactccccctttctttaacaactcatcggcacttacaccaaagaattgtgctagtttcattttgttctttgccttaggaacttttgttcctgattcccaataagatagcgtagagaaatttacatccaattcccttgctaaatctcgcagagatagatttcgttttttctctatactcctttaatcgcaaatgttcagtcatcaaatttaccccccatcttaacataagtattattgttcttgtcgtagcctaagatgtaccacctaacgttagataactctatccaactatcaccttcaaactcccaataaggtggctctactcgaaatataggatgtgcctgaattactacagtgtactccccttccaaagtaggtataccaaatgaagataagtcagctatagtatcttgatacgtccccatagaaaaatcttcatccaacatagccaactcaccgaacaagcaatcctcgaactctgcactttcatcccactgcttgtgtattacttgtaagtctaggacatcctgatactcttctgtattaatcatatcatagataagctcaatattccagttatcacttgaaacatagtccgctttaggattgaatagtgtcgaatgcactagtgattcaataaaagacaacttctccatatcattagctcctttcctttacaaaataagtatagcatgaatacataaataagtcaacacataattataaaaaaaagacccgaatgtctaatttttataaacaacttttaacgaagtcatacttctcgctgtttagaacctctagcatcatagcttcaggtgaaacgatgtctgcacctaatacttgacggaagatgtttggagttaaacctgatactagcgctactcctcgttcgtcatgacgaactggtgtgttgttttgacgactgtctacgttccaaaacaccacgtcaggtaacttgtaccctgcacgttcgaattttgctttcgcattttcaaagttagtgatgtctgcaccacgcatacagcggttaaattccatatcagaaacgataattaacttacttggtaagtcttcctgtttcatgttatgtttaactgctgtttttaagattaagtcaaacgctttttcaaggtttgtactcatatcccaatcagcatggtaagctttacgagcacggtcacgcaatgtttggttcgatggtacatgaaccaagcttgggtttcctgagaatgtaatgaagtggtctttgtaagcacctttcaaacgttctgcacagtataaagctaatgatacagagacatccatagggtctcccgacattgaacctgatacgtctgccataacaatagcgttgtcttcaataccttctagaacattgtctagagatttccaagataactctaaaacttggtctacgttaggtgtatgccaaccgttaagttgataagctcgaataatctcgtatggtaacaagttcttagcattcatcttaacttctcccgcttctacacggtctaagaatcgttggtatctttcaggagtgtgtctacggaaagcttcacgatatttgaataatgcttttgaaggcaatttctcaaactcgatgttatcgtagtctttagatgcaagtttttgctctacgattccgatttctttacgtagtgaacttaaagttctacggtagctacctttgtcactatacttgatacctaggtcttccataaggctgaaacctacgtttctacgttctttgtttgctgtagatgggcttggcaaccatttagctaacagagatacaggtttacctttttcaagggctaacatatcttctgttaatgtttctttgattacagccacagtagctttacgaacgaccgtgttatttgttttaacagcatgttgataagctgatacaacatcatcccaacgaccgatgaaagcgatatagtctacaaacttttctgcaacttctttatcattgtcagctaacgcatcgaatgaatttctgaaggcatcacgctcacctaaaccacctaaacgaatgttccgtagatgcactaagttacgaagagctagctctttatcctcagaatacgcatctagaaataaactaggtacttcggctaaacgagtacgcatagcccctgcttgagcaaagaagtctaagttactgttcaaagttgaactgtacgttaaagctccgttttctgtgtgtgtttctgttgtgtcctgttttaaagcatctaaaaaattagtcatgttttcaccctcctaaaggtatttttttaataaaaaaagtatgtcatatcattgtgatagacatacttaaataaagtcataatatcacaagaagctgttatacgtatgctaccattacaccactaccctcgtgaggataggtgggattcgaacccacaccttttgagtggaagtcaaagttgtatgttagttgtttgctgtgagcttctttatttctatttagttataattgctacaagagacatttatatacgtgctctaccaactgagctaccaaggacataacgtccctaggcaggactcgaacctgcgaccccgagcttaacaggctattatagtatttgctgtgagtctctttattttaacttagtaaataattgctacaagaaccgctacttacgtgtgctaccactacactactcccctgaaatagtattttgtatcgtacccttagggtaataggggagtcaggaatcgaacctgagccacgtcctcctgatggaatagtttaattgctgttgggttctttatttataaagatttgtttcaaatattaaaagcacaagaacgagatttagatttttattgtagtttcacgtcctacaaggatttacctataaaaccgttacgctgaccttaattgtgactacagggtaataggtcagcccctgtagctcctcttatcttcatctgtaagttttatagtttttttttgtaagtttgcagtgtcgttctttatattgcttttttcagtttaaacaagaagcgcagtcatagtctagtcttcagtattagattttttgtgtgattgctgtaggcttctttatattttaattataccacatgtttgtgtgttttgtcaagagtatttacaaaaatctatatattattttttctcgtgccttaccacttggctactctgcttgtggcagaggagggattcgaaccctcgataacaagatttcctttaatatgcgtagttgctgttagattttttattattagaatactcctgttacagaaacagtgccgttgtttttcttagctacagattctagaacttgcatagctcgtacacgagtactttcacctgtcttaacaagcatcgacttaggtacggtcacgttacgtgttttaactacctctttacctcgcttgtttttagttgtatattttttccttaactgtagttgaagtttcaactacaccgtaaaattcttttgccatgtgtatcatcctcctataagttaactataacatagttttcataacctgtcaagtactttatgctaattttttatttttatgtgcttgacttaagtagatatgtgatttaggatgagcagaacgtccctttgatgagataattccccatacataattttgatactgtctgcgttgcaatcctttttgtaatagtccattagctttcatgttcattctcctttgtatttgttatttgattacatacttagtatagcatgtatataatctactgtcaatacttttttttaaactttttttgttaaaagtttacaacttaggcgggaatcgaacctacacgctgttctagctaggaacatctctaccaagagactaagctacagaggtcgggaacccctcgggcatgtcatacaccccgagcacagtacctctttttaacctaatgtaaggactgcttagcacagcaaccctgacctatctccccgtcttcgtgctaagttcgagaagtgcttccaataagctttggtgtcatttcaccttctattgataccatctgcgactagacctcttcgaataggcggtagtgacagataataaaggatggtcaatccatatacaggtggtgggattcgaacccacatgtcacaaaggacacaggtttttaagacctgagcgtataccagttccgccacacccgcatgattaccccatcatagccattaataatgggtgataaggcaatagttcttttgttagttgagcattaagctcttcaagctcctctaaggatagcttaagtagttcatctaccatagtaacctcctacaaagagaataatctaccgatgtcactaggtgtatgcccatcgtattcaggagcatattctagctcaggaacatcgaataaatcccaatgctctagcttatagtggtagctatactgaccttcaggtgtttcaacccccacaataaacatgtcattatcgccaaacattgtaccatcgtgatgttttttagctttccaagcaacatctttatgttcgttaaacactatactagagagaaccattctatgaaaatatagctcatcaaacgtatggtatccatctgaaatatcttttacagtaccacctgattctttaactgcattgatattatcttgtgcattttttaatctcaagaaattagtagttaatattgacattttcatcctcctagatactaattataagggctttgttgggaattgaacccaaacctgtgcacaagtactaccaccaaaggataaacaccttatctagaaaaatgttcattgcctgatagtccaaagccatgtatggaactggtgggagtcgaacccacgtgttacctacttacttctccaagtcttctacaagttttttgcataccgtaatttttacttggaacctctagctaggtatgcgtgcgttatgcttactagagtatgccccaccttgtttgctctcccaacacgtacaaggttatgtgttagtgtatcctgcctctttttgactaaggagcttccgcaggctcatatccccttagtatacgtgtactgagcctaaactaggctacagctaataattcgttgtttgcagttatgtttagtttacgtttaagcacgtctgctacttgaacttgaagccctcaatagatagtcgataccaagaacagccccgtaaatagtgggagtgacatgcactcccctacgtaaatgaaatgggtttttgtttaggtctccatcccgaccaattaaagaatatgatttttaaatcaggttctttaaagtttttccttcatcattaagcaaccatactttaaggatgtggtcgcctctgtagaagggctccaaaggagctatctttataatcaagtcttccccttctgcgtgaggaacgtcagggtcactatcataacccatactgattgttagctctgacccgtctctcataacagcagttacttcatttagtgaagtaaacgttctagccacaccgtctatatagtcagttgtctgcttagttatatcacctttggctacttttctaactttgtctatttgtaatatcatatctatcttcctatctgtcttttatttgcctctcggctaaaaagattgagggattcgaacccttcgcaattaggggctatgtcctccccaattagtcaccaagaccagtcaatcttttcaaatccagtggacgggtctcgaacccgtttactacgttccacagacgtatgcctcaaccagtttggcttccacagggatgattgacctccacctaagcgcttagagtagaggcacttatgtcgtttactcttacaacaaccaagatagtgtattcacccctcaacacacagaacgtgaccattgctatcagactttttctaggtcaataggggcagatgggcttgaaccaccgacctatgcgttatcaacacattgctctaccaactgagctataccccccaagaggtgtactactagttatttactacagcccgtttctgcatgaggggtctgtttcccaaagtttacattgtctgcatgatatagtaaaccctcgaaaattctttgtcgaacagcacatgactagcagtactatggacatggcaggtttcgaacctgctaccgccccgttatgagcggggtgctctacctagtgagctacatgtccgtaatcgagctatgataactcgactagtgctattatttcatttgtagtatctacaacacctagaatatgaggttctagttcaactaagcctccgcctaaggaacctagtgcctccgcaaaggattgtaagaacatgagatattcaaaaggatgcccactgttaaagttggttactcctttatgagtgaagtgacgttcatgattaccccactcagtaggagtagttaatcttgcttgagtataaaaattaaatttcatagtggttcccccttgtctatatatacatattatcatgtattagaaagtttgtcaacacttttttgaattaatttttaaatttttccaagcatttcattactttcttttgtaatagcttctttaatcaataatgcaatagcaccattgtgtttgtttactgcggaaagcacatcggtatctgagtgtgttgtcacaacctcagctagatactctttcacaatatcttgcttaagagcaatcatgatagctccaatgtttttgttctccaactcaaggtcaccatgagataacacattgtttaaacgactatccgtaatataacgagatacatcttcaacaagagctaagaactcaggagagtattgaaccttttccttaaccttaactgtactcttagtaacttccgcaaactcttttgtcttatgtttaataccataaaatcggaagatgtcattaagtatatatcctttagtaggctgatatacttgaccctcactaataccgccgtagatagattgcacttctaagtgtccattaactagttcccgtaaagttttcttgtttgagacaggtgttaaatacttagcagggatatatttctccatcatgtcacgactaacaacataatgaattgtaccaccatcgtattccaagattacgttaaataatttaacgtctacttgcccttgcttgcacaactcgtagtccatacgttgaacttttcctccaaagtattcccccaaaggcatgaacttgtgtgacaccttcccaatctaaaaatttatttagtgagtttaccagttcagctccttgttcagaaacccatgttttaaacccaccaaattgtttgtcatctaaagtaagaaatccgctacgtttagccaaaccaacctcttcagtacctttggctgtcacgatagagatgttggctccatgaattttctcagtagcataccatacatcatcgtacacatacggaatacgtctatctttacctaaagcgtaatgatttgttagcgatggatattttaaaaatttcatagtcagtcctcctataaattattagtttcgtgcaatgcttgcgttagcccacataatagtttgttctaagttggtaatagctaatgatttttctcggctatcagggcactcagaaccaataaggtaagctaattcttttgctttctcacgtaatgcagtatacttctcaggttgcccttctttgggtgcatgatacgtaaagatgttttcgatttgtttgtccatgttgactacctccttaaaaaattaagcacctgagtgctattatgtgtagggtaggaatcgaacctacgctctctccgtcagagaataccaatagttctacctcttttcacaaggaagttcctacacggcggacggctccgctctaatgggcgcagagggattcgaacccccgaactctaaagagaacagatttacagtctgcctgctttatccatcttgcatacacaccccttgtaacctaagtcccaactgttctcagagtgacaacttacgggcaccaactaaaatatgaagttgcggtttagtaactaccacttaggttaatggaacatatcggatttgaaccgatgaccccctacttgcaaggcaggtgctctcccactgagctaatatcccaacttgtgtatcttacacacccgtgccccccgtagagtaacacgtatcctcagtataccaaccacctcagatacacaatatgtacgttttatttctaggacaaaaacgtcaccgaaaaacctagctcctatcgtaacaaagccaacgccaaccgttatgagtttgtggtaggtgggtatgtaccacagatacaatttaccttttcctaaccctgaaaggtctcatgatacaatactattataaagggtcttaagttatacacgtccgagagcggtgtacagagcttaaaataccgacagggtgggattcgaacccacgcacgttttaccgcctagtagttttcaagactaccctctttaccgtttgagtacctgccgaaatgtaacgaaccttaactctcaacctaaattctactcttgagttgttgacaccgctaagtatctccttatgtatactagttaagcaatcgctttaggatgcgcccttaacttattatatacaccaaaggtatgtccattttttttattttacggctagcctcatgatagcttgccaacttgggacaataggttaacagtctattccaagatgtttaaccgatacaggtggagggattcgaaccctcactgaaccgattctaagtcggactcctctgccagttgggatacacctgcataaataaagatttctaccctcagtagtgcgcacgttattaccttaggtatcaaactgtaatcgcaaatctcacaatccacaaacgctcttaagaacttccagtaatctttaacactcccgacaggactcgaacctgtaacctttaccttagaagggttctgctctatccaattgagctacggggagcaaaaggcacttagtgccaaagtttagctcgcttttttcactgacttacgtttgcgaggtcgcatacgtggatttttagataaatattcagtgaagtcgatatgttgcagtaaaggctctttaaccagttctttcttcttagttgatactttcttagcttgtttagtttcagtcattgtgggttcctcctgagtttattttatgtatatgctaacatagcacaagtcttttatgaggtagtgcttatactatgttagcagggcttgtcaagtaatttcttcaaaaagtacctcatacttttagctttatatacttgacatctacatatgacctgataggctaccctcggttcgcatttacagaggcggtgggtaacacgaatatatggactacaggagtcgaacctgcaccctttggttggaagccaaagatactacccttatactaagtccacatatcagcccattttactgagctgacttaaaggagaaatgtctatgctcacaactttttacagttgctatgcccaagaggagactcgaactcctgacaatccgcttacaaggcgggcgctctaccaactgagctacacgggcgtgaggcttacaaactgagtaagcctataccacttaaggtcagcgtttagcagtaaccctaggtgatgtttgctatattttttcaaaggagaaagctacaaaactccatgttgtacaatgccccttgatggaatcgaaccaccgacatctaccttgtaagggtagcgttctcccgctgaactaaaggggcgggtctcccttaactaaggtcaaggggaggttgtgaatcatcttttcctttattaacttggtcatagataccactagctacagtacctgctacgacacctgacagtgcgagctgtgctagggaagaacctaagtcaggcattaatagtcccatatacatacttaagactacaccaacgcctacgctaacccaagagagccaacgattaggaatcacattaggtgcttttaatgtttccactagtagcataactagcgggctcatcgttaagcctacacctaatattgttgcgataacttgttccatttgctatgtgccttcttcctatagaatacagtaattgcgacattgctatgcgcctgacaggattcgaacctgtgaccctccgattaaaagtcggatgctctacacctttcggataaccaactgagctacaagcgcagatttatttttcaagataacctactcgaaaaaggatactaaccaaaaactaaaggtcttgactgacagatttgaactgcctgctccgtaatttcttacggtgtgttaccaaagccatacaccaactattcaagattattcatttgttaacttatgaattaagtataacacataatttaatatgtgtcaacacttttttttaaagttgagatgattgcctaattatagctcctgataggcactcagtggtcacgagaatcattaatttcataatgattagaccaatagctataaaatcatgtatactcaacctaacgctcagtacaggactcgaacccatattaccacgtccgtagcgtagtgtgctatccagttacaccaactaagcaaaaggaaagtaggggaattgaacccctagacgtttaaccgccactagtttagcaaactagctagacctaccaatagtcaagactttccatgagtaagctaatcagaagttaacctactaacttgttcaaaccacttgttccattttgtatccactaaatccatagctgtatctagctcaagaggtacagcaaagggttggtcaataggtaactcaggagagtcaatacccacgttaatacagttagcttccctagcttcctgttcatggatatgtccacaaatggagcgcattttacgtctgtactcacctaaacccatagggtagtgcgttagataatactgaacaccgttgcgcttaacaatagtcccaacttcatatacaacaaacttttctcgcccatcgggtagtttaaagttatgatttttaatatactttaggactttactaccatcatgattacctttaaataggtgtatttgaccttttatctgacaaagcagttcaaatactcttttaggtttgttgttcatcccaatatctccaagatgatatagttcatcggaattggtaaccacactgttaatagcagaaatgatatgttcattcatctcatctactgaagtgaattgctctctcgtacttacaaaaccatctgcaccacaaatgttattatggtcaaggtgccaatctgaagttatatactttttcatgttaccctcctagaatattttataaggtacaatagattctttaccatcaatgcactctactttatgaccatatatgttttccatattaggtagcataccatgcttcttagcattagtcaagtagtagtacatattttttcaaaccgattatattatctgtatggaattgaacattttttatgttattttctaaactaacaagctctcgggttaaagtatacccgtccattacgtcttgacctaagtcatggtctaaggacagtaactccacctctgtattaggattctcagacaaccattgaatgaagtcttctcctgatgtgaaagctttatcataaacttcgggtgctaaccgtaagtcatctacgaatattttcattgttgacctcctaattaaaaatacaaagacatgaggtttctcagatacagtgacccttaaagattttattccttaacagtgtataaccttactcccattcgggaactcagtctttgctaggcacctaattctcagggaagggttcgaacctccaatactcagattcaaagtctgatgccttaccagtttggctacctgagaataacccccatgaagcatcacgggggaactgtagtatgtccaacctgcgggtatgctccgctcttacttcgtaaagtaagcctcaatttatggggagaggaggaattgaaccaccgacctctagtttttcaggctagcgctctaaccaactgagctacctcccctaagtaaaaacaggctctgtaggatttgaacccacaccaaacgggttggagccgtttatgctaccgttacaccaagaacctataactgaggagacagggctcgaacctgcgacaacacgattaacagtcgtgcgctctaccaactgagctacacctcaatgaacctagtttttcattaaccatatccgaaaggtaactaggaaccttcgtatatagtaaacacacataccctcaacttgcttcctcttgggtatcttaacctgctaaggcttgacttaactatagcatactactttcttaaaagcaagaaaaagcgtaactttctgatagtgtaatatgtttattgcggtggtgggaattgaacccacatatccaagcttatgaggcttgcgagttaccagtactctacaccgcatcaataatatcaggaatattttataaggtatatgttactgcttagaccactaagttctagataaggaatcgaaccttctaacatacagagcctgcacttatgcagtgagattccgaacacataagctccttaaaacatttgtatttactgccttattggtttctcactaccctagacagacctatggtttatactccattaaatacaatagcgtggacgggagtcgaacccgcaatcgcccgatagaaagtcgagtgccttaccagtttggctaccacgccatattgtgatgtattaggttattgacgagccacatctaacaaatccctgttctcactgcttacacagtagtctccacaggcaaaccgaacattaaggctcttgaggtagtttttcctatctagcttccatgcacgttcactagacccgtcataggggttgtcagcaacaatgtaagttgtttacctctatcggaaagacaggacttgaacctgcgacccctgcatcccaaatgcagtactctaccaaactgagctactttccgttatctacatacaaaacccgctatgtatgccctgttgggagtactaaaaccaacatttttcacctataatagacgtttagactataatctattaataatcagtcaggatttgagtcctacttaagaagtcactcctaagatagctcatttattttacggtcgcaacgggggtcgaacccgcatgttcacaccgtgacaaggtggtgggactgcctttgccctatacgaccattaggagagagctaagtgttatcttagctctatgaaaaaaaaacaggtagtagtgattactacataaactataatatcatgtatttatgtaggtgtcaatactttttttaaaatatttttaaagggataggtggggttcgaacccacgataacggttttgcagaccgttcccttaaccgcttgggtactaccccgcaattacttacggacgtaccacttcataaagtcttgatattcttcttctactttagggtcgtaatacccccaccatttactagactggtaaccatcgtggtagaacttatagttgtcagcaacccaagaaaagttttctattcttcgataagacttactcttaccaaaagttgcatcatcaagctctcctctattaagcctacgtctgaatctcctattatatactttcttgtattctttaagagatgagtggctactacatacgggatggtgcttataactacgagacatatgcttacctcctatcgttgactttaaaaaagggtacaaaaataggtagcacccttaagtactacctgttgactggttgtgaaagctaaaaaagcttacgtcaacagatagcgtgagggcagactgtgccccacgggttatcttgaataaaggggttacgccccgcagtatttgtatttttaagttgttcttcattgagtttatacatggttagtaaccacctttcttttattttatatttataatatagcacatacttgtatgattgtcaatacaaagtttattaatctttcaaataaggaggagctaggggggaaccctagcccacatgaactaataaactatagaggaaacggactggtatttcctctacaaattaattataccacactttttccttatttgaaacaacaaagtttaatttccgtattggttatatatatccgtgggtgtagctacagtttcgtttatccaagcggagtctaaaccataggaatctataccatagtgaacatctaacaaacgttcatagcctaacatagcatatacactagcttgggcatagtggtcatcacctttacgagtaatcgtttggtagaactgaccttcactattgtcgtcctcttggtctctaattaccacatttttccaatgttctacatagaaatcaagttcacggtctcgttgggaataaacaccaatttgaccctctttaagcttagtaatatatcgtttattttgagttagcttatcggcagaaacaatatttccgttgatgttccatgttggcttaacttgacctgtacttttaggtgttgaagggtatttacatccaaatacaacatcttgaccaaagtaatcaatcaatttagctaattttttctcctgagtccccaatatcagcaactataatgtcgggtctgtaaggggtcaattctaaaattattttctctacatctgcacctacagcacgagcatctaccacgtcaggtttaataacattaaacagacgaattaaatctacctgtccgttaggtttaaccccatgaatagttacccaatggatgttaccccaatctatacctacagagacaaaggcgtagtcccctcgattaaacaacggtttctctaggtaagagcgtttgttgctataaatatcatcggcagaaaccattaattttgtatctgcatacgggtacccaagtgtatagttatagaacgcttgtttcgatatggactctagttcttttcttttaaggctgtctgccgttacccaaacagcattcatctgtgaaatcatgtatccacgagtacctagaccacctttagtacggtcagggaatttaggaacccaatgtccattgtaccatctatctaacggttgtccacatttttggcatacgaattggaaggagccatcaactacagttttagctaccacatcaatacctttagggtttacacataaaatattccccctacgttcaataggagcctcggcttgatattcgtcatacttcatctcgttgtaatgtccacatttttcacacttgtgtaaataccaatactggtctgaacggtcaaatagtctatggattcccatatcaggggcactaggagtactccacctagtcacaatttgatacttagaacttgacatagattccaaagcagaagcctcagcaaaggcgtttacacggtcatactcatccattgataaatagtcaatatccacaccctctaccgcactaggttttgaacttgtacggaaatataagaaactatttcttatcttcttagcttcaagggaattaattttagggtcaacaatagtactatagtacccacgctctaacacagggtctaaacgagtctgtacaaactttttcatctgactgtgtgtggggaacgtatacagacatttaactgcatcgtaactatgcgtgtctgcaaaatgaattaagttaccaacacccatttcagaaagtccgagctgacgtgacttgataattgcccgagttctatgagtgtcatttataatttgtacttgccaaggtctgtgtgcttgggctttttcttgatttcttcctgatatagcaaaagttatcgggtgactacgcaccgtgtgattctttaataaatacgttgatggttgcatctggtctaacaaatagctcaactggtctttggttggtgtatctgtaccaaaggtttgtcgagccatgttagctagatgagaccctagctctctatttgtcatttaaaaggtcgcctcattttcttggttataacctatctctctttctcgtagaagtttttctatatcttcatcgggtagcgcttcgagttcagaaaggtcaataacctctttttcttctccatctacaagttctgtcttaggagttaatgctcggtctagtatctcagactgttttaaacttacagcaggtggtgctcctgtgcctcctgtattgccgttagaccaactgttaaggtctcctgccatactgataacccgaaccaaatcaggtacgtcagtaagctctacagagcctgattggacatttgccaagaacttcttaactaacaaagtacttgcttcatttattgtgtctaaaagctcttcactactagatttaggagcctttttcttttcaagcttttttcttatgttgtcagcagtattactcattattttcctcctccgcccctatatttgcatagcaagaacgtatatctgcacagatgttcacagtggcaatacttgatagtctacagctcaaatggttgcataccactgaagtagtgcagttatcaggaacaaaacttgttaagtttctatgacaaactccgcagattctaacacctgtgatacgcttgtctcccacatatatcttgttaacactagtagcagaacgcattatagcacttctgttctctttaatctcttctcgtgtaaggtcttttgtgtgtgccatttaattcctgcaactccctcacatcattttttaacttgctgatgtcttctgattgagaagctacgttcttgtaaacctgcctatcaacctttttcatcacaatacggtcatacatagtagatgctgaccatgaggcaattatcccgcctgtcatgtatgttaaggctacatggggtgtaacttctagccatacaccaccgaagtaagctaaaaccaaaacaaatagactgaatgttacaactaccaatgattttaatactaaatgtcgattaaaaaacttcatacatatcctccttataaaaatgctctatatacttaatttagcacacatcttactgaggataatttttcccgccacttatactatattataaatagctttactaggaggtgtgccaacttatgagtttagttgcgattgcaatattatgtgtgtttctcatacaactggtgtgctattggacaacgagtaagattgtgcctaaactagttctgtcacttcaacaaggagaagtatcatcaatcgtagccaatgttttttatattggtgttatgttcttcttgagcgtgtccagtatcggaatgctcttagctatgcgatatgtacaccttatatttatcacttgtagtatagcaataattatacttgtaactgttgctaatttcgtttctgaagggggtgaatgataccatgttcaatatgcctttcaaaagagtcaagcaccacaaacagatagtgctgagcttgaatacgaagacttacttaaggtcgagttcctagacatgattgataaatttcagcaagacagaacagtattccacatctacgctataggtcgatgtgcaacaacagccacactcgtaggtttctcatataactacaaggttaaacagagaaatcatgagaactacatcttgaaaaccattgacttaaaggagtatgggaaactagaatttgaaatcaagtcgggagaaaactacggaacaattgtgaccaaaaacagacaagccattgttcagaatttgatagataattttcccactcaaactaaagttacgagtttttctaactccaatatgaattaggaggatagtacatggaaaatttatcaacaacagacttagttcgtagaatatcaacactagaagaaaaagtgcaatcaggtgctttaacttcagataagaactttgttaacctagatgctgaacgtagagaactgtctattgctataaatgagctaaagtctatcgttcaaagtctagataaagaaactgcaatacaggctgagaagcaatcacacttgtactatcaaatcacacagttagaaaaaactgttgagagtatgaagggagacgatgttaaggaagtagacagaaaaaaagatttagtagaaaaaatcttcatggcaatcctaggagcatctgtcacttatatcttcagtctgctaaaacaaaagtaatatgatatactataagtataccacaaaaggaaggggttagctagtaaaaatgagtataaacgaaaatgcaatcaaagtcgtaatctctgatggttcagaagcttatgtatttgccgataagagaggtggagttactactcctgaatctagattagcaagtgccaaagcaggaacaggaaatggctttgttaatgtcaagctaggtaaagatagaaattctgaatctgactatgtgaacattgaccatattgttcgttatagtcctgttgggttaccaataccaactgagatagaaaatctgtataaggctcctgagaaagaaactgacgaagaagctaaaatcagaacagataaaatcaaagaatactataaccaaatctaaggagcccgagtcggcttctttttttattctcaattttttcccctcgtaagtttatataagtttatataagggtttaattagtatataaaagaaagataataagagactcaaaaagtttaaataggaaacaaagtcaacacgcccctcgtaagtttatataagtttatatatgtttattaaaagggtatatatataaaaagataataagagacccaaaaagtttaaataggaaacaaagtcaacaaagtcacttaagaggtttttgtgctataatattaatgaggaggtatttactaatgaacattgagacttcagaaaatataattgctagtaatattaacatgtcagtagactttatttctagtttagcaaaaatggatatacaagatttagattctgttagaaaagctaataaagagttatcttcagaatttgattacttagtaaaggaacttggttataaagatttttatgagttgtgtttaggttctctatcagtagagcaaacttctaaaggtggaaacaaagacttctctaggttaacagcagtagaacaaaccgtagtcagaaatggtaaacctactaaaatgaaaatttatgtagacaaagataaaaaagaagaagattcagaagggaatgacctagataaggaaactccttcagaaggtaaacaacctgtaagagcttctgaccttactagagactattcttttggtgatttaaactcaaaaacaacacctaaaaaggttttagatatatctagtgaactaactgattgggaagatagtcaggatttttcaagtgaatctactgattatttagaaggtcgagatgaaaatggaatactaaggtttttaacaggtatcagcaaggtaggtaaatttattcaagtagactttatcatatctgatggtacagtagggggttactggttaacttccctttatgaaacacttaaattagctttagataataaactaggaattaaatttcctgatttaggtgtaaaagctttatatatgttatcactagagtataacatgcaacttaaaggtaaatacctagttgcaacttttgaggagttaaaacaggcagtaggggatttctaatgtttttgctacctgtggatataacagttatagtcatttgcatagctgtagcagtttatgcaatatttctgatattccttataaacacagaaaagaaaacactacctagcagggagttgctagacataatacacagtatgagtgatataataacaggaggacataaaatggaaacaaaagatactaacttaaacgaatttgtgattggggaaacagtatataaaattgaggataacaagctaaacttggaagacttggtgcttcagaacgataacgatgaagattacgaagactacttagctgtagttacaaatctactaagagaacgttatgagaagtttagatttctacgtatctcacctacacatggtgattacaactcaggttatttcttgtcatttaccattactagagaacaagtacctgtagagtatgagtatttattccgattagctgttagtaaagggttaactgatagcaaaattaacgacctattttacaaagctgtcaaatcaggtaaggtcttacctcttggggatgtagagattgtcgtaggaacaggtatttcacctgttacccaagcagatgacttaatggctaacattgtatttatgccaagagactactatgaaaaacatttagaacttaaagaaaaggctgaaactgatggaaccaattaatacaagcaagcttgttactaaagaagctatcaataaacctacgtatgagagctctttagttcaaggacttattggaattgctatcaatccttatgagagaaagattgataggcatattcagatggctttgccaaatagtttggctactacagaaggtacagaagcttatgagtttcttaagaaagcaggtaaactaaaaagaacccctgaagcaggagttgttgtaactttatctaaagggcaacagtttatcagtacgaaaacaggtaaaaaagaaacaaccttattacttgattttgagtataaggaagctatgaacatagatgttgtaaaaaagattatggaaatctaaactaaaaagctcttgtgctatattaagatagcataggagtttttgtcgtttctatgtactaagcatgttagggggcgttaactagaatgacaaaacagcaagacttcttgaacaaaatacgttcaggagcagagaatacatgggtaacttttaaaatattaccttctctagtcggtgcacaagcagttttagaaagtggttggggagaaagttctctagctacagaagcaaacaacttgtttggtgttaaagctagcggtgattggaaaggtgaagtttatagagtacccacaaaagaatttttgaacggttcttgggtgacaatagatgctaactttagaaaatacaagagttgggcagatagtgtaactgaccacggaaacttctttacagagagtgattttaggaaaaacaactataaacaccttattggagagactgattataaaaaagcagttcacgctatattaccacctgtagctacttatggttatgcaactgaccctaactacgctacaaagataattaatattatcgaagaacatagattatacgaatgggacactatcgcaacaggcaaagaaaataataaggaggacaacaaagtgagttatactgtaaaaaaacaaatccgtgcaggacttcctcaagtaggtgtaacaccttatagacaagttcacgcacacagtacgggtaacccaaactcaacagctcagaatgaagcagattacatgggtcgtaaaaatatcaatgatggtttctacacacatgtggtaggtaacggtatcgttattcaaactgctaatgtaaatcgtggagcatatgatgttggtggcggatggaatgctgaaggttatgcaagtgttgaattgattgagtcacacaaatcaaaagcagagtttgaacgtgactacaagatttatgtggagttactaagagacttagctaaacaaggtggaatcccattaaccttggattcaagtgccttagcaggtattaaaacacataactattgcacacataatcaaccaaacaacggctcagaccatatcgacccaatcccttacttaactaaatggggtgtgtcacaagcacaatttgctaaagacttagcaaacggtgtcggtactggtggaaatccaacaccaaatcctacacctgctcaaaaaactgtaactatagctaaacatgctacacactacagtccaagcagtaaaggtgctaagatttctgattgggtaaaaggtagcaccttcgcagttaaagaagaaagagccatcaaatactcaaactctaatcgtgaatatctaatcactaataaaggagttccattaggttgggtactttctcaagatattgttggaggttataacgcagggaataaacctgcacccgcacctgcaccaagcaacacaggtaaatggattgcggaaaacgggacatttgttccaaaaatgacactaccattgacagttgatgcttcgggtaatggagctttaatcgcaaatattggagcaggtcaagctattaagtataatgcttacatgattgacagcaaatatgtttggattcgtcaaccaagaggtaatggctacggatacatggctacaggtaacgctaaaaacggtaaacgtgtagactattggggtagctttagttaagcattagagagggtttatgaccctcttttttgtttgctgtaatatttctgaaatattacttaatgttgttgttacacaaataccctacgtgtgtaacatctaactgctatattaagatatgtcatcacgacaagacaaaccaaaaataagaaaaggtggaaaaataacttatgatgaaaaaagctattggagcattagtactagctagtacgattggagttttagcactaggaacgacaacagcaaaagcagaggaagttaaggaaaacgacaacacttattatgtagtcgagtcaggggacactctatctaaaatcgcagataaatacggagtgaattttgaagcaattcatggtaacaacacagatactattgaacatgcagacttaatcttcggaggtcaaaaactactagtgggtggtaaagacttcgatgttaataaactagaaacatacggaacggcagttactgttgctgttgctgagcaacctgtagcgacagaaccagttcaagaagcagttgtagaacaatcacaacctgtagaacaagctcaagctgtagagtctactgtagtggcttcagatgataactggcataaagctaacagacgtatggttgaatcaacaaacaactataatacctttacaggtaatggatacttaggagcatatcagtttgccccaagtacatggaacagcattgcttcacgtcatggtttagatgcaagtgatttctcacctgctaaccaagaccgtatggcagacatctatgctaacgaacgttatggtggttggtctaacgtacctactactggtggatggtaatagaataaaaaccttagagagtagaccttcaaaagaggtctacttttttgtgctatattatttatatatgggtatttaggagggtgttaatatgttaccagtgacaatgatgttagcgttatgtgggatgctaacatattttattgtgtcttacatcttgatacttggtattgagaagaaacctgataaattttttggagtaaaatgtggtataatagtattaggcatagtttgcatgtttattatatttagagacatggcaagccccatattccaagaactcgcaggtatctacagtagaccttctgaaataggcataacagttaagatactaattatctatttatctagttgtgtattcgggtatattggacaaagaaaagaaataaaggagtaggatacatggcatatgtaacagatgagctgtgggttgaagctaaacaagtagctaaggctaacggaatggctaacaattgggttgaaatagtagaatactatcacagtctcggaggacatagagcaatggttcactctatcatagcagacaaacaaagagaaattttgcatgttctagatgatgagtctgttctgctaatagacagtaggtctaatttacacattgcagattataatgatgtcttagaaagcaaaaagttatttttttataaaaaagtagacaattatgagaccttagaattgactatcccacaaagcttaacgtaccaaggaaataatatcataaaagtaaaggtggtgtgaacgtttggcaaattggtttgaaaaagcaagaatggtaggtattgaagagtatagcagtgaacctaccaccgtaatagatgcaggagataactaccaagtagctattagaaaagctaaagctagccgtgaaatggttcagaaaggcttgtcaggtaaagaggtagcatactctgaacctttgattgactcaatgagtatgaacccctacttcaagattaaaccttctattagaaactctcaagaactgcatacagtattaaagaggtttagcaagaatattatcttgaactcaattattaatatacgttctaaccaagtgtctttatattgtaaacctgtacgatattcagataaaggtttaggttacgagattaggttgaaagattctgatttagaaccaactaaagaacaacaagaaacaatgcgtgagattgaggacttcttaaataatacaggagatacgaaagatgttactagagattcattcttaacatttgtcaaaaaaattcgttcgtgacacttatgtatatgaccaagtaaactttgagaaggtatttgaccgtagaggtaaatttaaacgatttacaatggtagacccatcaactattttctttgctacagatggcagaggtaaattgattaaaaatggagaacgatacgtacaggttatagaccgaagagttgtagctaagtttcaagcaaaagaaatggcatttgctgttcgtaaccctcgttcagatattgaagtggcagggtatggattctcagaaacagaaattgcacttaaacagttcattgcacaagagaacactgagatatttaatgatagattcttttcacatggaggaactacaagaggggtattacacctcaaggtagggcagaatcaatctcaacaagcgttagatatttttaggcgtgagtggaagagttcattatcaggtatcaacggttcatggcagataccagttatctctgctgaagatgtgaaatttgtaaatatgacaccttctgctagagacatggagtttgaaaagtggttaacataccttatcaatgtaatctgtgcggtatttgttattgaccctgctgaaataaacttccctaataacggaggagtatcaagtagtaagggtggttctcttaacgaaggaaactccaaacagaaaaaccaagcatctcaaaataaaggtttaatgcctttgctagaatttattgctgatacaatcaatagatttgttgttgatgagtttggtgacgaatacatgttcgtgtttgttggtggagatacagagactgagttagaaaaactagaaatcttaaaagagaaagttaagattaacatgactattaacgaatctcgtgcattagaaggtaaagaccctatcgaaggtggagatattatcttggatggtgtattcgtacaatctaaaggtcaagcaattcaacaacgtaatgttgaaaaacaagaccaacaagctaagctttcacggatattggataatgtatcaaaccctgagttcagctcagacgttgatgaagatgcagtttcattccaagatgttcaagaaggtcaaggcgggttagcaggaaatactgatagtgttaatggaaagggttcttataataaagaggtcggtaaagacggtcaaagtaagaatgcaccaaatgctaattcaggaaaagcataaatctaaattatagcacaaagtaaatgctttaacaactttgtgctatattatagtcagatgtggtataataataatgtaccacctaaacaacatcataggcaggtggtaagatataagatggaagctttaatggaacgaaaggttaatgtgtttgttcctatcgaccttgaaaactcattcaaaaagtctgagaccgcagaagacggtaaggggttggtatgtgcaaggatttgcctcaacacctgatttagatttgcaaaacgatatagttagccctaacggaattgacatttcttattttaaagagtatggatggataaattacgaacataaacaagatgcggaatttatcataggtgctcctacagagaactgttatgtagactttgaaaaaggtttattcgtagaggcaaaactatatgcagataattcttatgctaaagctatgtggaaactagcacacagtattaagaaatcaggagatgacaggtgcttaggtttttctatcgagggtgctattgttagcagagatacacaagatgaccgagtaatcactagtcttgttgttcgtaacgtagccttaacaacacatcctgcaaatcctcatgcaacttgggaaactctagttaagtcatggacaacaggacatggaacttcacctgagacacaaacaaatgcaggagcacttagaaaagaagagattgtaggagctatcacgacacttagtcatgtttatgctattaccgattctgagttgattgataaaacttgggacgatgttagtaaatacctagctgaaaatgagcaggtagataaacaggtagcaacaatacttttacaactaagtagaggtatatctaagcaacaagcaacagattttttaaataaggaaaggggttaaacatagtggcaaaagacattatcaaaagttttgacgaagaaatcgaaaaaaacgaagaactattaaagtctgctaaggaagctgaagtagctaaatcagaagatactgaaaaagctgtagaagatacagaaacagagaaatctgaaaaaggtactgaggacgaagcagaaaagtctgataaagaagaagctgaaaaatcagaggatgaagctgaaaaatctgaagacgaagctgaaaaatcagacaaagaggatgacgaggaagcagagaaatctgtagcaaaatcagataaagaggatgctaaagaagacgaagctgaaaagtctgatgaagaagacaaagaagacaaagaggaaaaagcagagaaatccgcagacttcgatgttgaaggtcttttgaatgtagtacttaaatcatactctcaattatcagcacaagtagcaacattaacaactgagcttactgcaatcaaaggttcacaagaaacaattagtaaatctttggatagcatgaaagtaacacctattcaggaagctactatgaaatctgtcgatgctgtagaagcagaacctgagggcaaagctgtaggttatatggagaaatctagcactattgacgatgacttcgaagacttagaaaaatcagctcataatgtagacagcgctcctgtaactgcaccaacaatgggagaagttgaaacaatgttcaaatctaaatttgaagaagcaagcaagagcgtagctagtgcacgagatgaaaatgcactacgtgaaatcactaaatcttggcaacgttatatcaatgaccgtgcaacatcaacggacactgagcgcttgaacaacttcttgaacggaaaataattagtttttctactaattactgacactttttagaagtgagtgctatattatagacagagaattaaatgagagctaacaatccccctagtgcctccgctaggttagctctttattaggagatataaaagaacgaaaggtgaataagcttaaatggaaaacgaaaaaaatacagtagatgtaagcaaagttgaaaagtctgctaagctatctgatgctcaagagcaagctgttaaaggttttacaactggttacggtattactcctgaaactcaattagatgcaggagctttaagacgtgagttcttacaatcagacttagttatgcaaacttggactcaggaggatttatctttctatagagacgtaacacgtactcctgttcaatcaacagttgttaaatacgatgtgtacttagcacacggacgtgtaggttctgcattgttcacaaacgaaattggtgtatctgaagttaatgacccatcaatccgtcaaagaacagtaaacatgaagtatctatcagatactaaaaacatctcaattgctacaacattggttaacaacattgaagacccattggaaatccttactgaggatgcagtggctacaattgcgaaaactattgagtgggcatcattctatggagatggagatttatcagacgatactcaacctgatacaggtttagagttcaacggtttggctaaacttatcgacaaagataacgtgttagacttacgaggagaaaaattaacagaggaagccctaaacaaagcttcagtaattgttgctaaaggttttggtcgccctacagatgcttatatgccaatcggtgtacacgcagacttcgtaaacactttactaggacgacaagttcaagtaatgcaaaacaacggacaaaacgtaactactggttacaacgttcaaggatttaactcagctcgtggatatatccgtttacacggttctacagtaatggagttagacaacatcttgaacccatacgaaccattacgtcaaaacgctccacaccctgctaaagttactgctacagtagaaacagctaaaggtggaaaattccgtaaacaagaaatcgacaaaggtttgctagaataccgtgtagtagttaatgctaacggagctaaatcagcaccttctgacattgttactgcaactgttgctaacgctacagacggagttaaattagaaattgatttaacatctatgtacgcacaacgtccacaatcagtttctatcttccgtaaaggtttagatacaaaccaattctacttaatcgaacgtattcctgcttctaaagcagttaacttcaagattgagtacgtagatgtgaacgaaaacatcgcagaaacagcggacatcttcatgggagaaatgagctcaacagttgttaacttgttcgagttacttccaatgttaagattaccattggctcgtactaacgctactgataccttcgcagttctatggtatggtgcattagccctacgtgctcctaagaaatgggttcgtatcaaaaacgttgcgtacatcgctacagacaacgtattcaacgaaattaaaccttaagcataaacacttaaggggaaaattgaataaagaatttaatagggaatggtcagaggctattccctatttttttaaaaaataaattaaacttttatggaggaaaaaatataatgttagtaaattacctattatcaggaaagacagtagcaacaccttatggagttgtagtatttaatgctcagggagaaagcaatgacttatctgaatcacaccaaaaagaacttgccagtaaggttatctcatacagctacgtagaggacaaaaaacaagcccctgagaagcctaaagaggaagataaggtaaatacacctgataaagaagaagctcctgtagaggctcctgaggacgttaaaaaggcacctgctaagaaagcacctgctaagaaaactcctgctaaaaaagaaacaactaaaaaataatttataaaggtgatagcatgatgaatcaacaaccaataggaacacatggtaacccccttaagagttaagcctgaggatgtagctaaatacacattagcagactatggttggactcctgaggctcttaagagctacatgtttggtgttcctgtaagagaccctgaaacgggtcaagagatgagtgacacctattatcaacattatcttgaagtagctgtagctaaagctgaaaaggaactagacattgcgatactccctagattcattcagaacgagcatcatgactactattcagcagacttcaactcttatatgtatactcatacgtataaaagacctattctctacgtagataactttactttagagatgagtggtagacagatatacaactacaaccgtgaatggtggagagtatacgggttagcagggcacattgaagttatgcctacagccttaatgcaatcagctatgggaggtatgggctacgatacgggtgtttatggtatgccaatgtatgcagggttacctgtggtaggtagtcagcaaacattcgcaccccaaatgatacacgtagactatgtagcagggttgttacctagagagcgtgcaggagttagtaatgaatgggaagtacctgctgacttagagcaattagtacttaaatacgcactagttgaagtattccaacaatggggtcgtttaatcatcggtgcaggtattgcaggacgtactttaagtattgacggtatatctgaaacggttcaaacaacccaatcagcgatgtattcaggttcagccgccgatattcttttaatcaaagaagatattgctgacttagaagccaacctaaaatcgtacttcggaatgtcattcaacgtagtataacggaggtattctagtggaaaaaccaacaagattcgaaaagcaacctgagagccaagcccccgctaaacaaactagtggggcaaggcttgaatttgatacagtcagtatgcgtaagtttgttacagatagaggtattgatgtcttatgggagcgttcatggtattgtacgtgtagacataaagaaacgttacaacctgacccatcatgccctatttgtttaggtaaaggagtcgcatatgaccctgcggtaaaaacttcggtagctattcaaagccaagaaaaaggtatagtgtctatggacttgggtctatatgactcaggaactgcgattggtactagtttcttaaatgagccaatctcgtttagagatagattaaccgtgcctgatgttaagatataccagtctatgatttttgatataaatgaaagaagactagaaaaaggtgtatatttatactatgatgtcaagcagataacgatggcaagaggtcagttacagggagaaaatggtgttaccttgactgagggtgaagactttgtgatggactatcaaaaaaatattttctatccaaaggaacacttactaaacaccaatgtgtctttaaacattgaaactgtgttaagatatatagtaatagacttattaaaagagagtagataccaatacacggctaagaatagaggtcgtgataacgctatctttgaagagttgccaagaaagctcttacttaaaagagaagacatctttattaaccctgaaccattttcattagaaagtaacacgaaagaggttgttaaggatgaagagtcagaaaacttaatgggggctaagagaaaaccgacaaacaactcaggattcttcggtaagatataggaggtaattatgagtatacgacctaatttgtttactaatacagaacaggtcttgagaaacttaactgaagctgttatagaggataccttgcaagagggggctaactatgcctctgagcaaggtatgcaagttaagcggatgcctaagtatttagaagtaacagaacaacggatggctaatcaaggtattatagacttaaagccctactttgctaaatctcctaatagaaagattaacaaagaaggtaaatggtatatgtacgtaccaattagtataaaaacaagagacatgtctcgaagagcttacgatgaacttagggctcaacctacaccacaggttgcaggagctaagactaagctgtacacaaactatttgtatgatagaagacaagagagttctgcggtaccatcattgaactataaacctaggtcaaataatgtaactgcaatagataaaaaatggggttcaggtactagaagagagtatattgcttttagaacagttaaccaagattctcctgcgaatagttggatagttaaccgaggaaaagctaacgaaaatgatttaagtaagacattgttagcaaatatggaacgacttatgaaatggaaacttaataacttgtaagggggattgaaatggtaccaagtatcgacacgcatcttaaaaaagaagttacaaacatgttagacattatcttacacgagtgctatattatagatgaagttttaagagacttcgaccctgaggttgttaaaacttttaagacagcatactgtggagacagtaaggctaaaaacgaagttactgtacgatatagcttccctgacattaaaacaccataccttgcctcttatgtaatacagctaggtgatggactagagagtaaaaattctttaggtggtgttgaaggaacctttataaataaagaaaaaggttaccgaagtgaggacttagatgttaaagttgataacaatagactttatgttgaagcttccgaagagataggggaatatattagtagtagtgatgttgcctttgcagagtccgataatcttaagattgagggtaacagattgtactttgctctcatgggtaatgagattttacttgatagagcaatcaatatcaaatactcatctaaataccctgctacggatggtgaagacccacacggaacttatcgagggttcacagcaagtgaaagtgtaagtattacttctttaagtaataatacagatactgttagatgcttagatgcaattctaaaagtgatattaattatgttacgacaatctgaccaagaacagaattactatagtctacaaaagactagattttctgcattagctcctgttataaatgacggagagactagagttatgggaagaaccgtaacgttaacttatacttcatcctactttgttgaatacaacgtagccaatagtatcaaagagattatttttaggaggacaatgaaagatggcaaagagtaaaaggagcaaccaactgaagaaaaaacacttcagtatgttcatatagacacattccttgatacagcgagaatactgtttacaatgagtgaggttcaagtacaaggttttagagcttatatggcaggtaatcactaccaaaaaggtgacgaagcttttgtaccatatttaaaaaaatatttaggaataggagactaaaaaatggcagtagaattatacccaatcaaaaaagtatctagacctcatacagagattaaaacagatacaagtggtatcggtggagcttcaagcggttccgttaaagtattaatgcttgtagggtctgctgaaggtgggaaaccaaatacagtttaccgagtacgtaactatatgcaagctaaacaagttttccgtggaggagaactattagatgcgattgagttagcatggaacccatcaacaaacacaggtcttaacaacgcaggtgacatcttagctatgcgtgttgaagatgctgaaaatgctaaactaaccgtagatgcaatgaccgtcaactcagaaatttatggtttagattctaatgatattcaagtagcgttagaagataacaccttaacaggaactaaacgtttgacaattgcgttctctaaagacagatacagccaaacatttgataacctagggaaagtattctctgtagaatatcaaggtgaggaagcagaagcaacaatgagtatcgagctagattcaacaacaggtaaagcttcacagcttgtactacgtgcaggttctgacttagcaagtgttgaaggaaaagcaattggagatgcagaggtaggaacagataacactgtagcgcctaaagcgggtggaacagtaacatttgaaaaaacttatgacttgggtacaggggtttatgaagatactaatatccttattagtgacatcaacaacttacctgacttcacagctaagttcttccctatcggagacaaaaacttaccaacagacacattcgaaaaactagatgctgtagacatcaagaacaaaaaagatgttttcatcacagctctagcaggagatattcaaaaacaaactgcatacaatggttatgtatcatttgattttgaccctcaaaaagaagttacaaacttcccactaactaagttagcaggaggaagtaacggtactgttcctgagtcttgggcaaacaaattcaagaaatttgctaacgaaggtggttactacttagtaccattaacagctaaacctgcggttcatgcagaagctaatgcctttgtacaagatagaacagttaacggggagcctatgagagtattcgttggtggaggatttaaagaatctatcgaagaattaatctctagagcaactaacctacgtagtgaacgtgtagctttagtgggtgcttcaggtagccgtagaatggatgacggacgagttaaaaacctttcaggttatatgcttgcttctcaaatggcaggattggcttcaggggttgaggttgcagaacctattaccttcaaaccatttgctattgaccagttagacgtaatcttagaaggagctcagcttgaccaactaaacgaaagtggagttatcagcttagagttcgttcgtaacagcgatgttacaggtttccgtatcgtacaaggtattactacttataacgataaaactgctcctgttaaaaacgaaattagcgtaggagaaggtcatgacttcttagtatcaaatctaaaaattaaattggataacaacttcatcggaactaaatctgttgaattgacaccttctctaatcaagaactttatccaatcattcttagatgataagaaacgtgtacgtgaaatcacaaattatgcacctgaggaagttcaagtagttattgacggagacgtagtgtttatctcattcacagttgtaccagtgagaggtattaacaaaatcgaagttacaatgacttaccaacaacaaatcttaacagcataatatctgtaggggctgtatagccccttagttttaaaaataataattaggagtgaaagcataaatggctagcgttattaatcaatccgtccacactggtaataccgtgtacctaatgattggaaacagaatcatcggtcgagcacagtcagctagtggtgagcgttcatacggaacacaaggtgtgtacgaaatcggttctatcatgcctcaagagcatgtttacttgaagtatgaaggaaacatcaacttagaacgtatgagaatgaaaaaagaagacttggcaacattaggaattactgctctaggtgaagacatcctattacgtgatgtaatcgacatcgttatgatggacaacttagcaaaagcggttgttgtagcatatcgtggatgttcagccgtatcttacagtgaatcatttacagctaatgaaatcgtaactgaatcaacacaattcacttacttaacttcagcatctgttaacaacggtaagaacgcaggtacaagcgttatctaagactttctatccctgaggactcctcagggtttttttgtgttataatagagttgtagcatataaatagcgtacttctcacaactaagtactatattataaattgagaacataaaaactagggggataaaaatggataacaacgaaacattccaaaatgcggagattagagctttatttgaaaagcttgaccgtggagaaaaattgactgatgaggaagtaaacaaaattaagtatcaccagtcagaagaagaaaaaacagcgttagacaaaatcgttcgaggggttaatgatatttatgtccacgaatacaattttgaagattatggtgggttaaagattacagttaaaatcaaagcacctaatgcaatcgaacaaggtaaaattaacgcagttcgtgaaaacttttaggtggtacaggtacaatggttaatacatttacctacgtagtttaccatacttttgctctattacaagtatgtggtattgatgtaccaaaagaaatcgaacctgaaaatgtgtataatatgaatattatttacaagataggagttgattttgccgattggctagaccgatttcaatattgatttaaaatctataggtggttcccgaagagttgctcgtagtacgggggtagggtactttggaacatcatgaaagagttcaaggtattacctacaaaccctgattttagggcactgacagaccgtcagattgagtttattgcatatagcatggagaaagatagagaagagattgaacgtgcaagaagaggtggagtagccgattcagactaccaagactttgacgactcatggtggacagcagaacatgatgactttgtggctaaacgtgaagaccatgatgaagttgatattgctaaccaagttcaagctatgacaactcctgaagatatggctaaactaagagctcgttgggatgctagtgtagaggctgaaagtattgtagccaacggtggaacaaccatagcagaagataacttaaatgaaatgatgaaaaataacttagaccgtgtgattaaagaagctaaagctctcgaagcagatggaattaacaagtggggcgataaaactgatattgaaatcagtgaagaaaaccaagctcaacaactaggttacggtaaaatcactcaggaaagtattgacgaggctatttcaatattcgaaggtggagacgaaaactttgcacctgagaccattatacctagcagggacgatgatttctatatttaaaaaataggggcgtaaagcccctttgaaagggagtgaaactttggaagaaaatatgtatcgttttggagtagatgccgacattggtagtgctactgagaaactgaataaaattgtagaacttatggataccattgatgggctaaacaaaaaagggaaagataactacttccacagctctcaaaaggatatagataccaacgttaaagcaatgcaagaaatgattagactatctaaagagctagaaagacagcttcaaagtttaaaatcagttcaggcaagcaaaggtgattttggtggtatttctgccataaatgaccaaataaaaagtgtacaaaaaaacctagatgagactagaaataagttccaacaattaggggacaatagacagtctatgtcaggtcttaacagagagactgttaaggagcaacaaagatataacagtgagctacaagacgagattaaatacttgagagaagttaaaagtttaactagagacttaaatgcaacggagagacgtgtaaagtctaggtctaattcttactcttcagcaggtaaagctacttttaaccaagctaatgtacttcgtggagacatggatacattaagcacggcagggtcaatgagagaagataacgaactacgcattaatgatttaaacaaacaaattaatacgattgaccaagagttatctcaacttgctaaaaatactagtaaaactaaccaagagcgtataaacgaagagtctgcgttaaaaaactcaagaagagtgttagaggatactattaaagctttccaagaaatgaatacaaccattggtggttttgatgagactattaaacaaactgctaataaaatgaatgatgtaaaggttgatgctaaccctgagtcatttgcaggtcaagtagctagtcgttctaactctattggtattgctattatgggttctttaattggttcctttgcaggtatgtattctaaaggtgctacggctaataaagctatgagagagccaagtatccgtgcaggacaagttacaggaaacagtgactttagagcagttcgtaaacaagcccaagaagcaggtctagaaaaaggtatcaattacaaaggtggggagatgcttgagttccaagatagtatcttatcatcaatgggattcaaaggtcaagaaagcctaaatgatactacacgtaccttagcagaaggttctagggctgttcctgtagataatgaaactctaagtaactttatggagagcaatatgcgaagtggtgcagtagattcagcaacacaagcaaaagcaatacaagaggctttcctaggagctattgagcaaagtggtatggttggtcgtgaaaaagaacaactagatgcccttaacagtatcagtagtcaagtattcgcaggtagaaacggaaacaacgatgagctgaataacttagttgcattgcaaaccttattcagtgaaaagggtggacgtgcattacaaggagaaaatggctctaaagtaatgagttctcttgacgaaggtattcgtaactcaatagatgacccaatgcttagtctagtctttggtaaaggtactaaataccaaggaatggatggtagatttaaacttagagagcaactagataaaggtatctctgaccctgataacttaaaaacaatgatgaactatgcaaacgctcaacaaggtgggatggctaccgatgatgctaagatggagtactttactttattagcagacaagatgggggctagtttacgtcctgatgaggttaaaggtatatttgaatctagtaatgggtttaaggatttagatgacgatacactagctaagatttctgaagagaacaaaggtctaggttctgataaatatggtcaaaatgcagaagactacaaaaactctaaagaaggtacagccgacaggtcagaggcagtaactgagtatcaagcatctaagactaacgattatggtgatgtattacgtagcatcaacagtaatttaggtgggctacctactccgttatacttattgacaacagccgtaacagcattaactgccacattagcaatgagtggaggaatgtcaggtataagttctgtaattaaaggatttactaaaaccaagttcggttcttctgtagtaagtaaagcaggggatgttttaggtaaaactaaactaggtacgaaagctatggaatacggaaagagtatctttacaggtgcaggtagtgcaacagctacagaagcaggtacaggactctttagtaaacttggtggattctttaaaggtggcgctgagacagcaggtaaatcaggcggtatgtttggtaaacttggtggattgtttaaaggcggtgctgaatcaggaggacttctaagtaaagcaggtggattcttaggtaaagcagggggcgttttaggtaaggtagctccttggttagctgtagggtctgcggtagctgatattgccacatctgatgataaagtaaaagccacaggtaaaaatggtggtatgctcgcaggtatggcaggaggttctgctctaggtacagcaattatgcccggaattggtactttaatcggtggtgtcggtggagcattcttaggttctaaagcaggtgaaggtcttgtaaacgcaggtcgtggagctattgattggagcaaagaaaagctaggcggagttactgaagcaattaaagacgggttctcttggggtaaagacaagattactgacggtcttaaaggtgccttcaacatcggtaaagatgttatctctaagggaatggatataataactgctcctgataagatggttaaaaaaggtatctcctcaatgtggaattggggtaaagaaaaggttagtggattctttggtggggaaaccgctgaagcttctgagattcaacaaagcgggcttagtgcaggtaaggataaagcttctaacaagaagtctgaaaacaaagctaagaacgaagaagaaaaagacactaacaataaaaaatatcaatctgagaaagttagagagaaaaacatcatagatgaaaatgctaacttatcattctattctactttactagatagagcaaaacaaatactagtagaggctaaagcacaaaatggaatattcggtaattctaatggaggaagcgggggcgacagctcaggtggtacttcaggtagtggttccctagattacttaggtgatggtaagaaatggacaaacgaggacattactaaacatgacttaggtaaaacagttatgggacttactgctaaagaactagacgaatggattgactctgtagcgcctgaaggttctgctatgcgtggtatgggagccgacttcttagaagcaggaaaacaatcaggtcttgacccaagatacttgattgctcactcagccgttgagactggatggggaacttctgcactatctaagaatggtgacaaaaatgcagggaactggttcggtattggtgcttttgacaatgaccctaataacggattcaaatacggagacggtttgacgggtggagccaaatggattgcagacaacttctattcagcaggacaaaccacattagaaaccatgagacataatggtggacaacatgagtatgcaactgaccctgattgggataagaaaatagcaagtatcatgaaaggttctgaatcgtatacgaaaggtaaagcacaagctcaaacattcagcacagctaactcagtgaatgtcacagttaatgatgcgggaagtgcaagtggagctagacaagtaggtgctagagtagcaagtgctgtgacagaaggcttgaacagcgcaatagatttttactcgaaagagcttaagagagcctagggttatccctaagctcttttttaaataactaggaggttagaaatgcctgagagaaagtataataggtacgtagcataccctgagtttggtattaaatttataacagaaacaagtgaatataacattagatatgctacaagtaaagatgatgtgccttcagataaattaatgagtcagagtgttattagtatgacaactaaaaatgctatggaagatgactccgcagtgttctcttttgtactatcaggtgatgtatattgggatagaatattagcaccaaacgatgtggttattcttaagattatacctgacacaaaaaactcagcttccttcacctcagtaacaaacgacactgttttggttggtcttgttaacgaggttcgtttagaggctgactatggagaaaaactctaagatgtacagaatatcaggacaatcatttgctaagatattgattgattttgagattggggttattcaagaagtatctgttgtattatctgaagttggttggttgcctgatgactcgtctacagggcttcaattcagcacacgtaatgcttcagaaatagcttactctatgttatctaagtttttaaactatactcgttataagtttaaagacggtaggacaatagatgagttctttgaatatgacgggttagatagttggacagagtatgagagtttagccaaccccttaccctttataaactacgaaggtagtttgaaacaaatgttagatgatattgctgaaaagccatttaacgaagtgttctttgattttacgcaagatgaaacttgcaagctaattatgagacggactccttttgatgagagtgattggaataatttacctgcgcatgtaataacatcaaaagcagttatttcagaatcagtcgctaaaaatgacacggaagttgcatctatatttaatgttattgtagataacccattagggatggactctgtagattttgggtcattccctcgttattatcaagctttagttgacaaatacgggtattctaagctagaattaaagaataaatatttacaatcagtgttaaactcaactgacgattcagattcaagttctgatacagatactacagataaacctgagggaagagaaattgaggtagaggcaactgcatacagttacaaacaggcaggtttaagtaacttgactgctacaggtattgatttacgggagcgccctaaagtgctcgcagttgacccttcagttattcctttaggttcagatgtttgggtcgaaggtatgggtaactatattgcaggagatacaggtggggacatcaaaggtaacaggattgatattcatatgacttctgtagaggattgtttagcttttggacgaaagaaaatcaaagtagtcatcaaaaaagaaggctcttctaataacagtagaagtgctagccccgcagtccaagctagaacagcaacagctagaactagtacaaactctagtgttaaatcaatgcactctgttatcttgtcttacttaaaagcacaacctgttaatactcttagagttagaaagacagcagtagcttcaaaaatagtttctgtagactcaagaatagacactaataaagctaacgctatcattgactcatacctaaagactagtagcttctctatagatgattttactagaattacaggaattaatgataagaatgtggatgatgcaggagacttaaaaataacctacagtaagcttaaaaagttccttaaagactacaaagataaaaccattcaggatagagaccttgttagagatgctatcatgaaagagtttaaaggtgttgataaggataaagcaactacagtagcttcaactttcctagaagcagggggagagttaaagaaatctgagtacgagaagatattcactaataactcaacggatggagtacctaccgctcaagatgtcaatgcagaggcacttaaaatctttactgaaaagataacgaattggtattgtgagaacggaaacttctacgcaggggaaatcaaagttgtaggtcatccaaattaccgtatgggtaacagactaatctataatgatgagcaaaacaatgaaatatgggagtattacattgaaggagttcaacatgactacagctactcgtcaggatttgttacaactctatctgtaacacgaggacttcaagaggggggaattagtcgattctctaacctttggggtaaatcagaagagtttaaaggtggattgcttggagagccttctctagctgagttgtttgagcaaggtaaagcttctcaaaattcaggtggaagtagctcaggaagtagcagttcaggtaactaccctgcctctagttctaaacaggttgagaaagccatttcatggtttagagaacgtgagggtaaagttcattatagtatgggtgaaaatggaccccgaacgggaccaaattcatatgactgttcagctgccgttttctctgcattgatatatgcaggtattctccctgaaggtacatggttaggtaacacggaatccttgtatcaattagaaggtagcttgttaatatctgtagataagaaagatgtacaacgaggagatattttcgtagcaggggttaaaggagcttcattaaatgcagatgggcatacagggatgttcttagacagaaacaatattattcactgtagttcaagtgcaaatggtatcgcagagacacctgcacaaggttacatgggggatgcaagaggtttacctgtgtactactatagaataaaaggagttaagaaagatggctaatgtaggtttaggagcaaaaggtggcgctgtagctatgcaagcccttgaatacgcagacaagttcaccaaggataaaggtttcctatcagtatacagtcatggcaatcttaaagcaaagaaggctaaccctttcgagggtaaacctccttttgttttagatagcgcacagctaatctactggtgttataactatgcagggattgaaatgattggtggttcttctgaagttaacgtcaaaaagataagacatgatactagatttagagtaatatttactgaaggacaaaagcatgtcagcatttttgataaactcttagcaggagatttaatctttttcggtacagatacagttcatgtaggtatctattatggagaaggggagtttattagtatcaatggtacaggagattgggatgctagtaaaggtttagaacgtgcagacttaacaaatgggtactggtgggagtttttcaacggtgcagtactaagatgggagtaagtgtgctataattaatatatgagaagacaaatttaggaggaacataaatggcagagagagtatttcaatcaggactaggtacagaatgggaaagagcctataaagaaggtacaaaagtatcttctctgatattagcccaagtaataaaagtaaactatcaatataattctgtagaccttgttacgtcaggtaataaggacacatttcagagttcttacactgacgggggtaagttttctgccagacttcctcttgagtttggtggacgtaactctgtcggacaaccttacggacaagttaaacctgttaatgtaggggatactgtgcttgtaggttttgttaatgaaaataaattagcacctgttgtattgagtgtatacggaaattctacagtcaatgaaatgctgtctagaactccgtttaaaaatgcagactatcaagatgatactttagttagacaaacaaatcaaaagtttagtctatacccttcattaacgtatgagaatgtggacggagaaggtaaccgaactgtaacctttacaggtaaatcattcttaatgttcaattcaaatgataataaaacatcggctttgacagacgggaaccacggtacagaatatagtgaactagaatcatcatactactcaaacgatgaagaaattgaaccaatgaacccatatgctccaaatatcttatttaaacatcaaggagttatgaagcaatcaggtggggaagataatcatattactttatttcatgttaaagatgacggtactgttcgtatgtctacaatggataaagcagatgattggagaacttactttgaaatgactcctaacggaggagttaagcttagaaaacaatttgatagtaagattgtagggcaagcactaaaaagctctgagttaggtatcgcagaggatggtacagtatttttggctaacggagatacgtacctagaagttaaagctgacggtatttactcaaacgggttaaatgtagatgtagaccttactgagattcaaaatacattagacgagcaaggtaaaaagcttgtaattttagacatgtctgtaacaaagacaaatgaagcgcttactgttatcgcaagtaaaactgaaataatggaaacccaagttaacgatattagtagtgagcttgttattatggcaggtttaattgaaacgaaagtatccgaagctcaagttaaagatattgtaactgaagaagtgaaccttattgcaggggatattgaaaagattaaacaagacaatgtacggttaactaagttaattgatgacatgtctgacgatggtctgattactcctgtagaaaaagatactttaatgcgggaatgggttattattcaagatgagtacccaacttatgttttacaagcagatgagtatgaggtagacaagacaacttacgttagtgcctacaacgccctgagcgcttatctaacgcctttgtttgataagatggatgaaactactgcgatagacccaaaagagtttagagcgaagtttaaggcgtattacgatgcacgtctagctatcctaacagctatacttttaaacattaaagaactagcggtagaagcaatgaagaaagcttctgaagcctcagtagatgcaacaaacgcatggcaagaagcaacaaaagctcagttagatgctaacacagccaattctaaaattgcagatatggctagtgatggtaaactaactcctgtagagaagtatgagcttaaacgtgaatacgacactattgttaaagaacatcctagtgtagtagctcaagcaacaaaatatgaggtagctaccacaaactatgtttctaaatacaatgcgttggtatcttatgttacaggaaacaaactatttgacgacatgggagagactgtagctgttgacggtgaacgattaagagcaacattttcagactactacctagaaaaagttaaattgttaagagctgtaactgataaagctaaagagattactgatgagcatgaaggacgtatctgtgttgcagaaactaagattactcaaacttcagaggctattgctttactagctactaaagtagagactatagagggtactgtcgaaactcatactgcggagctaaaagttcaagcagaccaaatctcacaaaaggttactgaagcacaagtagcacaacaaatcaaagataccgaaattggtatgacaaacggcttaagaaactcaggtttagtgctagataacacatactggacagattgggctagttcttctgctgttgtggggactagagcccgagtagaagtagcaggtttgcctaacttagggtatggttttgaaatatcaaaaacctctacaggggacggtcataagttcgggtattaccaagaaggtgtagttgttcttcctgcgacagaatacactattagtttttgggctaaagctaaaacaggtacagttactgcgactttacagaaaagtgggtctacagaagatactgttgttactaataaaacagtaggtacaaagtggactagagtatcttatacttggaagacagcagaagcaacaaccaagattaactatgctttaggtatggcggatgctaatacaggaacagttcaaatagcaggaatgaagctagaaactggtagtaaagcaactgcttggtctcctagtcctttagattcaaaagctgagattcaagatgagattgctaaaacacctattggaggaacgaactacatcgcattcagctcaggaaataaccaatatcctcggctaatgattaaaaatgtagggtactattcaaccacaggaggaacaactacttttgaaggtgaaacggttaaactggttccaaactcgggggcagaggctaattataatataggtacctcctctacagcggaagctagagtaggactacctaattatgggttaacagcgcttaaagacggggactatgtgaccttttcagcagatgtatctgttaaaggtggtaatgctgttcttcgtatatatcttatggataatggctcttggaaagaatacaggtcagatactattaccccttctgatggggttaaacgtgccgtggttttagctaaaataacgtcagctacagaaggtatttttgtgtcgtgtaacaggttttgcaggttctaccgcaataaatttctctaaaactcaactagaaactggtatgaagagtactgcttggaagaagtcggatttagatttgcagaatgatatggagaacgcagttacaacaggtattgatgttatagacagtcgtatgagtaatttagtaactaatgggtatggtactttgggttctaatagaaactttggggcactggtttttgacccgttagataaaatagtaggtgggggttcatttaagtatgagtctgcgggtgcaggtcaatggtttacagatgagtatattcctgttaacccaacacatatctatgaagctaattattatgccaagtctaagctagggacttctcgaagctacttctgtttttcaccttatgatgtagataaacagaaaattgaagttcagcattgtggcgggttaaactttatagatgctaaaccaacaacagttaaactagctaaacctcttaaagtaggggacactgaagtttggctagatgatgtgtcacaatttcctaataacttaggggacaatgcacatcaacatagtattgcactatggaattatacggataatagtggtaaaaactacgggacaacgtatactagatatacatatacctatgcgtataaaaatggtgctgtggatgcaactaataagaagataaccctgaaagccccttggagtatcagaaataagcttacttctgacggtagtttccctgttggacatcctgtatctaagactaatgcaggtagtgggtacatgtatgggaataatcattccaacttaatgctaactaaggaatataaggagtttactaacactacatctcaatggaatccaatgaatagtgcaacaacatactttaaattaggattgctagttaacagggatgtaacaggtggagatactacgtatataaacgggttatctttagttgactctacggataagcaagacttacaggttcagattaatggtaaagagggcgctatcatgaaacaacctagcgcacctactaaccctgctgtaggtctgatatgggtagatacttctgcggtaccgaacgttgctaaccgatgggatggtacagcatgggttaaaatgtcacctactgaggctaaagaaattggtgcgttcaacgattctgatgggcgtgatttgattgatagaatgtcaagtgctgagcaaaaaataacttctgagagtatcacaaatactgtattagagtctaatgacttcacttcattatttgatactaaagccaactcagaagacctactagacttagctacaattgaccaattaaacagtcaatataactcctttgaaagtttgttagagcaaaagttaggagaggcatatagtaccctatacgagagacaatctgagttagaacagcttgttagtgggtttgattttaaaatccaacaagcagggggtatcaacatgctaagaaactccctagggttctcaggtttagacttttggggtgatgatgctcttgtaggaagtaacttgtatccatcaactagttctacgccgagaacaataaccataacaggatggaataactaccccgcaggagccagtcatagaatggcagttacagcaggagatagttacactgctagagtatactacacttctgtaggaacaggttccaaaggggcttcacttaagtttatatggtggaacgcatcgggagccctattatcggagtcaccttcaggtaactttattacttcaggcaatgtaggttatgcagttataactgcggtagcccccgcaggagcagtaaaaatggctgtgacattacgaaactcagaaaatgtaactaatacggtttcatataaggagttaaaagtagagatgggggtagaacctactccgtggtctccttctcctacagatacaaacgacaatgggcttagtactactacccaagataatgcactagcaaacttagggtttggttcaggaattgttcataaagcaggcggagttcggttaattcagaacgtggtaatgcctgcaagaggaacgtatactatgtcgttctttatgaaaaaatctaccagttcaggtgctcacggtggagcaggggttgagttgtttgccgatggtaaacgattagccttcattggtgctgaggaaggtgtcgcagtaggggagtactctaagtattcctatacgttcgatacagcagatttaaacatatctgttcaaatggtggcatggggtaacataaacactacggtaacaatgagtggtcttatgtttaacatcggttctctagcgctatcatggcaaccatttccatctgagatatataatacaaatgttttgattgacattaacggtattacagttaaaaataatcaaacaaatggttataccttgattactccaacagagttttcaggatatgctcaggtaggtaatgagatgacacgaatattcactctgaatggtaaaactacagaggtagaggagattcaaattagaagcaaaatacagatgggtgcaatcacagtacttccaattgattctgataaaaacgttggttgggcattcattggttaaaaagggggctaagctcccttttttgctgtaattgtgctataattatatatgagaagacttatttaggaggtaaataaatggcattaagtggaaagtggactaaactattcgcaaacaatgcgtatgagcttattttagagtggagtggttctcagaacatatccgctaacacaacgtcagtcactgctatattaaagatacgtggagtaacttcttactctacaatcaatgatgcaacagcaagtccaactaatattagtattaatgggaataacaaatcatttaatcaaacatctacggttagtgcaggacaaacaagagaactaggtagacatactgtaaacgtagggcataacgctgatgggtctaaacagataaacatatccgcaaatcatttttgggatattaactggtcaggaacagggcaccaaacgccttcggtgggaggtaatgttgctttaaatacaataccaagggctagtacaggttcaggtagtaattttgtatttacaggtaacagttctatatctattaaccgagctagttcaagttttactcatgtagcccgtatacacgtagatgggactttcataaaagaaatcacagggttagggacttcgggaacatttaactttactgatgccgagcggaaaaacatagtaagtaaaatggcaaacagaacaagtgttcagtgtcgagtagatttacagacccgaaatggaagtaccgttattgggggttggacatcctttacttacaatgtaacagctcccgcaaaagcaggaggtacagtagctgatttcactattagtacctcaggattccctgtacggttaaacaactataatacaggagccaaatttagttatgatgctacatggacgtttggttcgttcagcaagaaagttacaggggtagctcaaaactttactttcccgctaacacaatctgatgtagatacaatgctcaatattattaaaaataataatacaggagtaggtagtataacagttcagagtttctttgacggagttcagtttggcggaaatacttcaataggttccgtaactgctagagtcgatacagctttgtatgcccctgatgtgaaagcaggtagcacatataaagatactaatgcaaagtcagtagctcttacaggtagtgaccaaattattattcaaggggtgtctcagatttctgttactattcctgcaaacttgggaacatctcatgggggagcaacattatctaagataagaattgctttaggtggggctacaaaagagatagactacaccgctacagcaacaactatagcattaggtactacaaatgcgaacagtaatggtaacttaacagttactgttatagatagtagagggaactcagggttatggagcacacctgttactatattaggttatagtaaaccacaaatatctcctgttattgctcgggttaataactacgaaacaactacggaaattgccctatcaggaacttattctcgggttatagttagcggtgtcgagaaaaatactatcgtatctgcacgagttagatataagcaaaatcctagaagtgatatatggagtgctgacttggatttatcatttaatgcaagttcaggtaatatatcttcaccgcctaatactacaatcacgttagataacacgtactcttggattgttcaggtagaagtaaaagataagttagattcggtaaccacatatgaaacatttgttgcagaaggtatcccactactatttttagatactaagttaaaatctgtaggtattggaatgttccctaatacagagcgagctttacaattagctatgggttacgatttgtatgccacacaggtgtttgctagcaatgttcaaacaacaaggttagaatctcaaacagttaaagcccttgggggttatgttcctataaatattcctgccaatgataacttgaataattacacatccgcaggtttttacagatgtgtgtatacagatacagctaaaactatagcaaatactcctgtaaatcatgctttctctcttttagtagagcaacatgcagggtgtaagcagacgttcactacgtattttgcaggtaaccctaatacttatgttagaaatttctacaacggtggttggggagaatggcaacttggaggagaacctgtatggttacgtacaggagtaggtatgggttatggcacaacagctaacttgtctagagcaggtcgtatggtcactatttatgttggaaggcagatacgaaattggagtgctaccaatgagaataccgctttaagtgaaacaattcctgcgggatatagacctgcacaagaagctacattcgttctgactagaaacgtagctaagtcttatacacaacctgtacggattcatatagcacctagtggtaagatggcgtacacaaatacacaggcaacaaatgcgatagttacaggaacactatcttatattacaaatgacccgtacccataaaataaactagaggaggcaagataatgccacaagcagatggacatacgtcatatcttagaagaatagcgcttgagcttgccaacggaggatggtactttttcaagataaacccaaataactacgcccatagtgaaccacaaagggcaacgattcttaaaacaaagtccgatattatcatcgaagactttggtaaagacttagagacaatcaccttttcaggtacaacaggttgggcaagggatgctcaaggtcgtactggtgcagacagaatgcgtatcttacgttcttatatccgagattacgcatcacaaggaggtaatggtaataggtcagtaaatgaactgaccttccataacttcactgatggagaaagctacattgtacatctagctcctgatgctatttcattggaacgagatgtagagcaaccaatactctataactataaactaagtttagttgttattcgagatgcagggacaccacctgatagagaggtagttgacccaaatatcggtaataatgttcctagtattggtggggatactgaaaacacaaacagcaactcacgagaggctattaatcaaagagtaatgtctacaggacaaatcattggagcaagtgctttagctagtttttcaggtaatggagagaatggggttgtgaaccctagaggaaccgttggtgcttataaatatggtgtagatgaaataaaacaacaaataggttatggggagggttaatatgtcaaaagtaacacagtcatcggacttaatgagatttatttcaacattaaatattgaccctgaaggtgatgtaattttaaatgttatagacactgaggaacctaattttatttcaaggttctataccccacaactaaaggttagtgaagcaggttcaagagtcagtgataagataaatcttaaagagatacaacaaacaggtaaacagttaaacaataataccttgacaatcatgctgataaatagtaatcttagtattattcacccttatatgtataagctagcacaaagtattatacttgattcttttgctttagtatatgcaattgaggaagataactctctacttcgaatgttagagtcaaaagacttactacaaaccactcagaatatcaaatacttaattgattttttaggagataaagatgagtatgtagagatagttgagcggttacacagcttgagtgttgcggtaggctatattgaaaaccaattgcctttattaaagggtggtgcaaatggctagatataaaaagtatactattaagcaaggagataccttgcagagtattgcacataaagttacaggaaacgtatctgattggattgcaatagctgagtataacaacttaaagtacccatatattgttagtgacgactttatgaagttgcaagatattgaacatctagtagtatggggagaccagttaattatacctttcgaagcagatttactggacacagatgttaataaattaaatagacgtgaccaagattatattataaatcttacttttggtagagacttgaacatgacctcagacgaaaaatattataacagatatggtactagtgatgaactgctagggttaacacataattatgcaggagatattgctactgtgcaaggtattgataaccttaagcaggcattaactgctaagttacttactcgaaagggttccttactattacatcctgaatatggttctaaactacatgaactattcggtaaagcagatgaagtcacgatgaagcttattgaaatagaggtttgtagagtagttcagacagatagtcgggtatcaaattgtgtgttagattccgcagaggttaatggggatgagtacacaggtaggtttttagttgagatacggtcactgagagaatcttttgagctgttggttcaaggagacagtgaaggtcaaatagtcgtagtagacaaggaggaataaaatgagattaaaaagactatcagaaatattatcacgattgattgacgtaactcttgtcaatacgagtgctattaatgacttcacagtaggttctactattttgtcaatctatgaagctttttctatggaaatagagcagtactatatgctaagtagagaaaacattatgtggggtatcgaacaaggagtccttaacggatttaatttctataaacgagaggctaaaaaagcttatggtgaggtaaccattgagtttcacactatcactcaggatgcactagttatccctagaggtacacagtttgactctattatggaaggctaccaagggtctattgcttatgaaacaatccaagagtatttaatacccgcaggaaccgtaacatttaaagtagatgtgtatgctactcgtgcaggagatataggtaatttacctaaaggctatattaaccgcatgattaatggaattggtaatgtcaaacgagtatttaacgaagaagacttcctaacaggtactgaagaagaaagtatcaacgatgttaagaaaagatttcatgcgtttgtagaatctagaggtagagccacagtccaagctttagactatggtactaggcaggttgaagaagtatcaggtgtttatatccatgagcaagtgggtcaagtagagatttatgcccatgatagaaatggtaacctatctcctacaatgattactgctattgaacgtgagatagaaaattatagacccgcaggaattaggttgttagtttatcctgtaactaaaactctgttacctgtagatattacagtaaccctatctaacaagagtcgggtaaactcggagacagagaataaagtaacatccgtagttcggaactacttaaacagtcaacaagtctcacaagaattagtgttagctgatttgattcaagcggttatgaatatagatgatgttcttatttatgattgcaagattgataattatacccaaaacgtaaaagtacaaaagtctgaaatcattagagcaggagacgtaactgtagacttaatataggaggatattatgggaaattttaaaaacatatacatcctctgcttaagagagataaacgactagaggttaaggatgacagtaactttgccatccttaatgctctagataacgttcttaacgaagcagagcaagacacaataaaaagcaaaatccaatcctcactagagacagctacaggagagttcttagaccgatggggtgattggtttggtatatatagagaagttggtgaggaagatgaccattacagagagcatatcattcgacatacgctcttacctaggggaaccattcagtcaataattgatgcaattaaatggtttctaaaagataatgatgccaatattgaaatatatgagccgtggaagaatattttctatactaataactctaaattgaacggagaagaccatttgatgggttattactataggtttgctatcattgatatttccattgatagacctttccctcctgagattattgacatcatatgggcgtttaaaccccgcaggtgtgttattctatgtgggatacgactcaggaaatgatattacctccgagcatgttaaatctccttatgcggaaatgactatagataacactcaggagctagaccgattaacaggtttgggtatagaggttagaggttcagctaaaacaactgatatacgtggggatgcagtaactagtaatatattccacaccaacaggtcattgttgaatggggaagatgttttagcaggtgcgtttgaccacgggagagagcatattcatttatatggaacagcactcaaagagactggaaatatcctttcagcaaactctaaacttgagaagactggaagtcgagagtttgttaatagtcctgattgggatttagctcctgcaataaatactaatggaactgacatatggtacaaagctactttcgagttaaaactagcagtagcaggttctgtagatttttatttccaaaatgggacaacaacaaggtactcattacaagaagtagatactatgggaaattcagatatgagattttctgctaacagagtaactatttcaaatgcaactacggaatataaaagatatactttacgttttcgtgctagaatatcaaaagcagatgaaactcaagctatgttagccttctttgccacttataatacaggaaagttaattacagttaaaaacctagaggtgtttgctgaggtaactaaatcaatagatgtattagatacaactactcttgcggaagttaaagcccaattaactgaacttgataatgtgagttacgcttctctaggtaactatgacggtttagtagatagacggtctactgaagataagtacttatacatcatcttcaatatccgagattacttaaccataaacttccctaagtcttatgacaagttagtcggaggcagtccttctgtagttaataagggtaaatatagttctttcatgaagaaccctacaatatcttttgttttacggtctcttactagcccaacaaacccaactaagttgaaagtaaagttaaaagactttgaattaaacaaatgggatgttatatcaagtaaagacttgacacaagtagatttgttagctaatatagaggtaggaaacatagagagttatatctcttctgaaggtctcatagcaattcagttagatgttactaatacagctaaggttcctgtagatattgactatgtaggttacacatttacaaacaaaatgactacagggtatgatataaataaatcattgcttgtgagtaacatttctgaggttgtaacagcctaaagtataaaatctatggtataatgattatagggtacttttaagtgccctattttgcaattatatgctatattaatagttagagacaagtataggaggttaataaatggcaatagctactacagatgctagagtgcaagctagtttagattatgtgaataaagcaagcagtacgtatctagcaatcggaaagaaaactgcatggacaaatgagaatactcctcctgcggaagacccaaacacctcagtattgcaagaagtaattgggtataaaaaagtagataaagtaagcctgtgtaaaccactaacacaaagtgagagtacttcataccctaccataacatatggagggtcaagatatgctttgattcctgtggataaggcttatcaagaaaaagctacactagtttattttgaaacagaagtgttaggaacagatttaccaacaggaacatatagacaagtaggcatccattcagggttagtacctaaagatggagttacaaagaaagtgttattacctactgaggttaaaagtacaggtattctacagttctttgcaaataaacaattccaaaatagaacagaagaagtacgaattaaagagagattcatcctctcagtagccaacaccaaagaaattttataaggagtgagaacgtttggcaacagaaatcaaattagaagatattaaccaaacaccatatcttagccgttttagagcggaacaagatagaaatatggtactatacagacctgatagaccattgcaacaagctgagctaaatgaagcacagcaaatggctatggacggtctagctaaactaggtgatgcgttccttggtgatggtaacctacaatcaggtatggatttcattaaaacaggtaacgaattgacagttaaagatgggttagtatatcttaatggtcgagtaagaaactttaagcaacaaacagttacaatggcaggaacaggaagagaagtagttggggttaaactacaaagatatgttattacatctgaggatgaccctacgttactagaccaaactagtggtgttccttctgccttctctgaaggagctgatagacttcaagaagtggttattttaacagttaatgataacgcttctgctcctgtgtacatctttgatgagggtgaactattcatcaatactgaaaaccctgagatggataagattaacaaagtattagcggaaagaacttacgatgagtcaggctcataccgagtacatggttatgacttgtacacagagaaacataagactaaatctgaagagtttattcaattagtagttgacggtggacgtgcttatgtgttagggtataaggtagacaaacctacatcaacaagattagaccttaaaaagtctaaagatgtacgttcagttaacaacgaaggattctattaccaaaatgctactcgtaagagtaagttaggtaatgctcctgtatcaagagttacccgagttacaggtcaagtacgtgtaactaaagaaacagttaaccgaggagtaacttcaggtggtacagacttcttaggaaacacttctgttattaaagtagaaaaagtttggactgaaggagctaatgcaaaagagttccaacaaggtacagactaccaagtaattaacggacaatcaatctcatgggcacctaatggagcggaacctcctgcgggtagtacttattttgtaacatatatttataacaaagctatgttagaaaatacagactataaaatcaccattgagggtgaaggagataaccgtgagtggtggattgactttaacgggatgacaggttcgaaacctgtagacgaaacactagtaaacgtagactatgacttctatctagctagaacagaccttgtggttattgacatgaatggtaacattactatcaaagaaggtcaacctgagtctcttcgtctagtagaagcaccaaaccacttagacccattgactttacggctaggtacagtaactgtttaccccgattcagataccgcagttgctcgttcattctctattgatagattgtctatggaagatttacaaagattaaaattccgtgtagagaacattgaatataacgaagcagttaatgctctagaccaacctgcaatggcaggagagaacccactaaacttacgtggagtattctctgatggttttatctctttagataaatacgatgtaagtcaccctgatgctaaaattgctttcagttttgaggatgcagaaattacattgccttacgatgaagctaacaaaattgttcctaagattttggaaggtgactctaacgctcatgtttggggtagattggttactgcaccatttactgaggttgtagaaattagacaacctttcgcaacagaagcaatcaacgtaaacccatataacgtgtttaaccgacaagggttactaaaactggaaccttcagccgataactggattgaagaagaacgtattacagtgacacaagaagaaacatcaactgttaatattaaacgttggtggaaacatggttctgagtcttgggtgcaagatgaaaagaacaaatatggtaacatcactctagatgatggagcttcatggacagactaccaaggcgttaaaaaaggtgccgaaggtgacatcatgggtactattatgacaagtggtggacaacaaacgatggacagcatgattgagttcatgagacaaatcgacatcaagattgaggcagagaacttactacctaatacaaacaacctgcaagtatacttcgatggtttagcaattcctgttactcctgctgaaggatacaagaaaggctctgaaacaggtactggtatctctaacgcagacggaacattcaaaggtactattacagttcctgcgggtatccgatgtggtgtacgtgaagtaactatcagaaacaatgataatatggcttctgctacgtatacagctcaaggaactaagaaaacaactaaagatattattgttagaactcgtgtaacaattagtttgtatgacccattggcacaatcgttccaattacaatctaacagagttatcaccagtttcggtttacactttgcaagtaaagaccctaatcacaacgttatcgttcaggttcgtggtatttcagaaggtggacagcctaacaagactatctatgcagaaacggtacttactcctgataaaattcttatctccgatgatgcaagtgctgagacaaaagttaagtttgatgacccgttaatgattgaggcaggtaaagagtactgtatcgttgttatcacggattctgataaatacactatgtggtgtgcaacaatgggacaacctaagattgacaatccaactgagactgttaactctaacccatacctacaaggtgtactattcagctcatctaacgcttctgcttggacaatccatcaagcaacagatatgaaattcactatctacacagcccaattcaacccgcaagctactatcgaatttgatgttatgaaaaacgtaaaagcagataatcttgtattgatgagtacttacttaactcctcaatctacaggttgtatatgggaaatgaagatagttatggagaatgagccaatcagtgtaacggttgacgacaaagaatggagacctattgccaactatgtggatattgatgttaaccaagtagctagagaggtaaaacttaaagctacattcgatgccaacagatttattagtccgttgttgtcattagaagacatcatgttcgttggattcctaactgcactaaaaggtagctatgtatctcgtactattgatttacgtgatgcaccatttaacacagttaaggtttcattcgatggattcatgccatcaaacacaacagtggttcctcagtttagcctagatgaaggtaaaacatggaaatcatttactaacccaccaacggtaactcagcaaactcaagagttcaataaacttgaatatgcagagaaggttgcaacaggtacagcaacttataaatcgttcaaagttagattaaacatgacaactcaaaattcattccttagacctcgtgcaaaacgattaatgtgtctaatgaagagtgaatagtaataactgctcctacttatggtataatgtaagtaggagttttatttttaaggagggttaacatgcctgaaatacacagacaatctaaatcaggggctttaatatttaagcctacaatccaagaacaaacaatggcagatacgcaaaaggcacttgacgagaagtcaaaggcgttggatattaagctagccgaagtagatagtttaatagaaaagtttaaatcactagataaagtctaacatggttaggctttttttgtattgacaaatacttgagtacatgttattatagatatacaattaaatcaagtagaattaaattgctcctattgtggtataatggatatagatacaataggagggaaacaatgaagatacttgtagatattatgacctcaaagattatttttgaggaaggggaagaacaattgattcccttagtccaagatgcgatgcacagaaacttaggtgtaaagcaagacggatatttttacagccctgcttacaaatcagggtattgggacggtataatagatttttacaataaagaagacgactcattccatacaggattgttaaatcaagtagactctattttaggggagttgcaaggaacatatacatttacatacagtattgtagatgatagacctgacccctttatgaaccctgaagatttacctgacaacattcaattgattggagatggggatgaccctatcactttacgagattatcagttcgatgctgtttttcaagcaatagataagcaagtaggtattgtggaggttgcaacgaatggtggtaaaactgaaataggtggagctatcatgcaacaattacttccgtatttagagagaggggagcgtattgccttcttcacgaataactcgtcaatctttacacaatccattgatagaatagagaaacggttaggagtaaaagtgggtcggtatggtgcaggacacaaagactttcaacagattacttttgtgatgatacctacattaaatgcaagtttaacagcagaccctgaaaaagggcttaaactcacaggtaaaaatgctgttgttaagaaaatagctaaagaaatagcaccaagactagctaaagggtataatcaaagatttgctttacgcaaccttattaaaaattaccctaaaaaatccaagatggatgaaaaagttttaatggaacttgaggatgtcctatacacctgtgggtcagataacgaaataaagttcaggattcaagggtacgaagctgagtatcaaaaaataattgagtctaaaaataagaaggtatttgataagtataacgaagcagtagacttttttggagtctgttgctgttatgatagttgatgaggctcaccatactagtgcagacacttggtatcattcactaacgaaatgtatcaacgcacagtatagaatagcattaactggttctgttgatagaaaagacaaaatgctatggcagagattacaagcgatatttaataagaccattataaaaatatctaatgagaccctgattaatttagggcattcagcaaaacctaaaataactatgttccctattgttagtccacaaggttatgatgaggcagattatatgcctgctagagagttatgtattgttaacaatgaatatcgtaacacactaataactcaattagcaaacaaggcatactctgagggtaagggtgtgcttatcttagttaatattgtggagcatggagatataatttctgaaatgctaacgaaaacaggtgtagagaactcctttatacacggagagttagaccttgattatagggaagagcaactaactgctatgagagaaggtagactaaaagtcttaatagctactacgattgctgatgagggtgttgacatctcaggtattgatatgttaatattaggtgcaggtggtaaatcactaagacaaacacttcaacgtgtaggtcgagccctacgtaagaaaaaaacaggggagaacgttgccacaattatcgacttcattgactacacaaataaacatttgttgaagcattcaaaagaacgtagaaaaacatatgttcaagagaagtttgatattgaagatatacaaataaactaaagggggagagccactaaatgtgtttgacagcagaacaagtaattgaatttaacatttcagatggcttccttacgtttataaaccatttaactgctaaatcagctagttggggagacaacttagcagtaacttttcaaagaactagactagcagaagagattaatgtaagtgtgagaacagtaacgaactatattcaaaaggtaaaagaattaaactttggtgaagttgaggctaaaaaaggaagaacaggtggggggacagtaattgtgtttaataaagacatcttaaattttgaacctaaagagaatccaataacagcagacacaaagactgctgaagaaattagagatttgatgtttccccgagttattaaacctcaaccacttaggaagtatagaactaagaccgagataaccgaggctgagttgctcatcaaagctcgtaaaggcagagagtgggaacttaatgagatgcttgacactatgcctcatgttacccgagagttttttgataactttgatgagcctgagttgtattacaaagcttaccttgtctctaggatgtataatgcttatgcggttatcttcccaagagaacgtatgcttcagcatgtggatgacactaggttgtacaacttgaacaaaaaagctatggaatacgcacagaattgggatgttttaccttatcattttgtgggtactcctgcctataacgtttttgttcgactacaaaggacttttgatgagaaaggcataaacccactaggatacttaacaactcagtttgattatgttactttcttagctgagcataaaaaagctagacctaatgcactaccttatgtgaatgcactaatttctgatgatgctatggaacgttataacaagcagattagattctatacgtggacacgaaatagatttaatgaccgtaagatgagtaatgagcgggtactgtatatcggagctaaatatcctattattcaagccttacagtttgcatacaaaggtgtttcaatgggtggtaacttaagcaacttgatagatgagatgtctgttaatgcaatgcggttaactaaggtggactatggagatttaggtattgagctagatgctaacgatattaagcacaataactatgttcatagaatagaacggttaactagatattacaacacagtattattagaccttaaggatagcgatatttcagaagctgataaaaatattatccgtgcttatcttaaagagcaagtagccttatactcacaaaaaaattctctatcagcaacccaatacactcttgctttccctacacagatacatgaggttaaacgtactgttatggcaaacaacgctgatatatctaactactatgcgtatattgggaacatgagcaaggaagagattacaactttagaagagtttgaacattatgctaagcaaggtgagctgatggacttctctattgaaggagctaacacattcagagaaactagtcgaatgattgctcacgatacaggtatcggggttaactctcatgatgtaggtgaggcaattcgaaactatggtgtagaaaaaaattccaattgataacttcgggatgttggacttagcacagataattaatattaaggaggactaggacatatggggctaaaggacttatttaacaattggcgctacaaaggatacaccagtgatagtgaggtagctagaattagagctaaacacacaggagaacgagttagacatatagaacaactagatgcgatgtctaaaaaatatgattctttggaggaagaactaaactctttaagaaatcaattgacatttgtacccaaatttgataagctacttattgacaataagcaaattgttcaagtagcaaactctgtgattattccgccaaatcaacttgctatggttgatgagagtgttatcaaccaagagaagttgattgaataccacttaagagaagtggaggatgcgctattggactcggttagagaagagatagctgttcaacaggaatacacagaaagaggcttagaactaagagcaaaattatttatagcaaaaaaatagggggagcaaaatgtcacaaacacacatccaaaaacaaatcctatacagagcgattaaagaccctgtatttgcaaaagaaacgtttactaagatacctacaaatacttttaacgatgataaggcgtatattgatattgccttattggttaatcgttactatcagactagtaatgttccgttagataaagaaacattgttggttatgttagaagataaaatggtaaaaactaatgctaatgcagaaaaacagcaagcattttatgacacagttaaagatttatacactattgattcattcgaccaaaatgaggatgtaatcaatgagaatatgcaaaaaatatattcgtaaaacacttattcaacaaactttattaaaagaagtaggtaacggtaatctagaagacgaggatacaattaataaccttattagtaaacttcaagatattgctattatgagtgcgggtggcggtggagaaactatcaacttcttccgagattctgatagtaaaaaacgcttacttactcatatgcacaagaacaaatttaaaacagggttccaagctattgatgatattgcagacggagggttggctcgtggagagcttggtttaatttttagcaccctatggtggtggtaaaactacatgggcggttaacttagttcgtaactacgtcatgcaggggcttaacgtgctgttcttgccattagaggaaaaacttgaccgaatggtactacgtttcgaacaagtcttctcacagcaagctaagagctctttaatggcaggcggtgttttgaatgattcactgtatgaagaaattcaaaagcttataaccaactattaaaccctgaaggtcaaaaaggttggggagagtttgtaattgctaaatatatgcctcgtacattaagtcctacaggtttagagcaagagatagttaaccaaacccttgtcttgggtaaacctattgatgttgtcattattgactaccctgacttaatgattaacccttttgagaaaggttctgataatgaatctcgtgcaggaggtaaacttacagaagaaattcgtagaattgctcaagaatacaactttttaggttgggtattctcacagttgaaccgttcaggtgtagcttctgagtttcgttcagcttctatgattgaaggttcaaaacaaaagctaaaccctgtagaaattgcattaactattaaccaaactacagaagaacaggagcaagggtattctcgtatgtatgtggataaactgcgtaatagaacccgagcagatttcaacagaatgttaccttttaaatatgtggatgaaactatgactttgcgtgatttaactgaccaagaggtactacatcaccaagctatcttagaggacttagaagaaagtgtaacaggtatccgtaaacagaagaagaaagaggcacagtacaataatcaagatgttcaaaacaaactaaacgggatgaaccaagcactacaaggaggattccaacaaccagtagcacaataatatcaaggaggtataacatggaaaagtatacagtaactgttaactatggtgagtatgcagaaggtatctttgatacagaagctcttgctgatagctatagagcaaaaaagatattaagagatgagcctgatacgaacgagagtatgactgaagaagagctcttagaatatgatgcagatggctattatggaacactaccaattagaatgggggaaggttgacatgaaatattgcaaaccttactcccccgctatgcacgtatgttcagtggactggacataatcatgaagaggtagaggcttttctagggtctagtaaagtagagtacgacagtaagttagagttgtattacgctccaagcttgttagctaagaaccatataccgaaaggatattacattgtagattatgggagacacatgggtggaaagaagatgatacaccctaacatgtttccaaaaatgtttaaggaggtaacacatgactagtagtaaaaagaaaccattggcgtatttattcaccgattttcacgcacatctatttaaagatttttcacaccctgatgctaagtatcatacagataggttcaaagctcagttagatacactagagactattctatgtcaagctagagaggatgacttacctgttatctttggtggtgatttatttcataaacgtatttatgtagactctagagttttcaaccctgtctttgaaatgttcgaggcatattcagatgtcacagtttatatggttagaggtaatcatgatagtgtaacaaattctttaagaacagttagttcactagatactttcagctcattacctaatgtaacagtgattagtactcctcaaatcattgtacaccccacattcatgttgtttggtctcccatacggtgaagagaccgaggaaatgaaagaatggttaactaagactgctgatacacataaagacaataaattgcctaaagtattagttgctcatgttggtgtagagggtgcaactactggaaagtattctcatacgttagaaggtgccttcagagcctctgatttgctccctgaggcgtttgattatatatacctaggacattatcacaaaagacaagaactgctcccaaacatgatatatggaggaaatacgatacaaacaagtttctctgatgaagggcaaactaaaggttatcatttactttatcaagacggagataaagtccaaacagagtatattgagatacctaataaaatgtttatcacaattacaggagatgaaatcccaagtgatgacattttaaggaacaattatatcaggtttacgggtaatgaggaacaggcaaaaatagttcagactattcgtgatgaagagaacttaactaatatgcgaataactgttcagaaagagtacaacgatggttcccgattaggtattacagcagaaacttcggaagaagaaattgtctctgcttatgtagaatctaaagagttaggggatgccgtagagcagaaagcattagcttgtttaagagaagcaaaagccttgagttaagacccttaaagggtcttttttgtattgacaaacaagtaaatatgtagtatactaggtataacaaataagagaggggtaataaacataaatgtttatctttaaaaaggttactatagacaattttaggtctataggtcacgttgagctaaatctagacaaccaaggtttagttcttgtcgaaggtgttaataatacgaaccaaacgtatctatctaatggttcaggtaagtctacgatgctctctgctattccgtgggctttatacgacataacacccgaaggtgcaaaagcagatgacgtgattaataataagattggtaaagacactagtgtaatactagactttgagattgataaattaccttatcggatagaaagataccgaaagcataaaaaacacaagaataaggttcttttattccaaggagaaaatgatttaactcaaagtaccgttgctaacactaataagaagatactagaactctttggtattgacttaaacacgtttcttaatagtattatgtacggtcaaggtgacgtggagatattcgcaaaggctacagataaaggtaagaaagagatacttgagaatgtggctaatattgcagtatatcaagaagcccaaattatagccaaagataagctagctcaggcaaggttagctcatagcgcaaaacaaacagagttacaaactttaaacgctaagctaggagacttaacttatcaagaacagactgaagctcagaattataaaaaaacggctgatttaattaaacatcaaaagacagtcattgagggtctgacggctgatttagccaacgtacaagcttcggtagaacaaataaaagaacagtatgcacaacagaaaacagcattagagcaggagttagctactatcgaagaaccacctgtacctcaagacttggtggaagactacaaccagtttaacgcacagattgtgcaattgaactcggcttatcaaggtaaacagcaggaaatagctacacttcaaaaaaatatgtctagtttaggtactagcgatgtctgttatgcttgcggaacaaagttagatgtatctcatcgagaagctgagagagagaagttaaatcagcaaataacagctattgaagagtctatcgcacctaccgcatctgcgctacctttgttacagcaacaacttgaccaaaagaagaacgacttggataatatctattatacaattaatgatattaaccaacgtaagcaagaactaaacaatcagttgattacgctaaataatcaagaacaaaatataggtacagaagtcacaaatattcaataccgtttagattctagtatcgaacagctagctaatttagaatcattacctaagcctgttaagaaaacagcagagaaaaaagagattaactcagctattgttgtagctgacaacgagttaaatatcttagcctttgaaattgaagactacgatgtgttaatcaacaaagttttctctaacaaaggtattcgttctcatgtattagacttgactactcctttcttaaatgaaaaagctaatggatatttagctacactatcaggttccgatatacaggttaatttactcacacaaaaattaaataaagatggctcactgagtgataattttgaccttcaagtcgttaatggtagcggaggagaagattacaaaacaaactcagcaggagaacgtaaacgtattgacttagctattgcgttagcaattcaagatttaatttttagtaaatctaacttagctactaatcttattgtttatgatgagtgctttgacggtttagacagcataggctgtgaaaacgtaattgacattctaaaagataaacagaagactgtaggtagtatattcgtaatcacacataatgaaaatttaaaatcgctatttgagaaagtgattactgtagagaaagtagacggaatcacctcattagtagattcaggaggaaaaagttaatgagaacagacattattaaaaagggggaatacggaactcttcaagtaaacggtaagtttaccagtaaagacatgggagcagtcatgtatgcaagcttccctgtaaaaacattatttgattggtacccgttaaactcccattacacatataaatacagtgagaaagaggatatgttctacttagcggtagatacagacgggctacttattcctcgttatggtctagaaaacaataatactaatggggttaagaataaacctagcatgggtaaaagtttacgaacaggggaacctacatggcggaatgaagaagtgtatctccataatcaagaagtcattggttttgctacccgtttaggtatacgtagtccttatgaggatttcacccttaaagatgtactagatgggctatcggtatttcaaagagcccttgatgctatgtacgatgaagcaactacaaaatacattcagtatgacgtaaaaaattctaaagatagtcttgacaaagactctaacacatggtatgatggtaaagaatattatcagtataacccacaagatgtaaaacagattacaggtaaagatgaagaggcacgagcggaactcgttctagctaatctgaaccaagatgaattggagttatactacaagttaggtgaagtatacactatgctcatcttaatgcaaaaaatagcaatcgctagggggtagatattaaatggcagtagaggactttttctcagcagagttgggtattcctaaaaatctaggggacgaacttagatacaactgcccgttctgttctgccaatgatgaccacaagttatatcttaacattggtggtggggctagagacgggttatggcattgttttaaatgtggttcccgaggaaacccaccatcatttgttatgcaactctatggaatatcttatagggaggctatcgaggagctacaagcttacgattatgaccctgaacagaaatgggtatctccacaaacactagggctgactgatgaggagtacttattactagcgctaaagaatgaaatacagcctaaggaagagttagagcacacctatgttgccccacctttaccgatggggtataaacgactagtagataacttgcataaccctgaggcgtatccatttttgttgtatgcacactctaggggattttcattgcaagatattgcgagacataatatagggtatttgacacacagtgtggttaacttacctagtggtaaaactttaacactaaataaccacctagttttcctatcacatgatgaatcaggtaactatatatactggaatacccgagcaatagatggtagtagctttgttaaatctattaatgctcctagtatggatggagaatactccaaaagtactgtagtatttaaccttaacattgctaagaaaactccttttattgtgataaatgaaggtgttcctgatgcgttgacagtaggtgagtcaggggtagccactttcggtaaacaagttactgaagagcaagtaaaagctatcttgaaaaatatccaccctgagcaaaaaaatttatattttactagataatgatgcgaaagctcaaataacatcactagctgaaaagctatatgttaatcataaaaacacatttatagttatcaatcctgtaggagatgatgctaacaaaatgggtcatgaaaaaacgtgggagttaataaacaataactcagttagggcagatagtcaaggaatcctaactctgatgttgtcaatctaaggaggacttatggcagtaaaatattatttagagcctattgaacctaacgattataatggttggcatgagtttgctgattgtaaactggtagactactatcaaccttattatgaagataggtacactgaagtcaagaatgaaatttttgagggttctgtttgtgtactagatttctatagaggaaggtcagcttcaggagttcacgtattagtgacaggacactctattgggaaaccttttattgcaaacatgagcagtcaaaatcttgtaggacttcttaaaggaactcaaatggtctacggagaagctaaaggtaggtttacacttattaaaaaaggcgcaaattgttttgtagcctatcaaggaggataaaacacatgaaaccaactattgatgtaatgttagacgtagaaacattaggtattgctgatgatgcacaagtcattcagatttccgcaggagctttccatctagacgaagttgttagagagcttggggactttaaaagtacatttaactttgtactagacttgagcactctaggggataaattaagcatggagttagggactttacaattttggacatccgattccgataatgcaagagtattacacaaattaatttctgaggaaagtggtatttcagaagagatactagtccgtaaactgcacacatggcttactgacttattaaaagattactctgagattaagttatggggtaacggcattatttttgataatgttaagattgaagcattgtttaaaaagtatggtcttaagtcccctattatgttttataatcaccgagatgtccgtactatccttgaattaggagcagataagctaggtgaggatattaatagctttagaaacgattatgctgatgggattgagaaacacaatgcaattcatgatgtattatatcaaacacgttatgttacaggggcatacagtgtattaacaaaccctgaatattatttagaagtacctatgaattaaattataaagccacaaggcatgagaggaagtaagtaatggataaattagttagtttagtagaagaatggtcaaaaaataaaggattggacaaagctgagtctagtaaacaattcttgaaggtcactgaggaagttggggaggtcgcaggtgctttagctcgtggagataaagaggagctaactgacggaatcggagatgtgtttgtaacgctaatcatcttagctcagcaaaatggacttacagccgaagaatgcttgacccaagcttacaatgtaattgctaagcgtaagggtaaaatgattaatggtgtctttgtgaaagaagaagatttgaaataaccacatagttgtggtataatagatataggaggttattatgacaaaagatatttcgttaaatgagtacattacgtctatcattgcattacatgataacgaaggtaagaacaaagataagattgaggaactacgtaagttacatggggacacacctacaacttatgatgatgtagaaaaagcaattcagctaatggttaactctattatgcaagatgttattgttggtgagcgtgtgcaaggagcatttaatcagtctatcatagcaatcttagtagaaaaagatgtaatcagccaaaaagatgcagacaacgtgtctgatataatggataatgtacacaatcagttatataaagaattaggataggggaaaatacacaatgaagaaaaaagacaatgttattgaactaggtaaaaaaactaataaagaactaggtctagaagaagctctaggcatttgggcaatgtatagtgccacaggtcgagcacctgctgacattactttagaggagctacaagctatcggtaataaaaaaacacgagtacaagacgttacttctttagtgaatggtcttatgttccgtgaacgtaagcttattgaatcacttattgatgacaatgctattaaagacatcattctacaagataagctaggggttacaaaagaagactatgaaaaggctaaggaaactcgtgctaaagacctagcggacttcgaaactcagatgcaagcagaaattgctaaagctaaaattgaacttgctagtgcaaaagataaggaatacaacgatggtgagtagattagaaaaaggagtgcacgactggttggttgtgcctctttcttcaaagacagggtactgtataattgcttctttggttgatggaggttctattgctatgatggagaaccaagagcctaacggagacttgcagttattcgaaacattagaagaagctctcactacagctaacattctttctgaagagtatggaggaaccgatatttgtttacgagtaaatcctgttaatgagtttctgcctatgttaaggagtgagtacagtgataagatggtcaatatatccctacaaggaaaatagctttattatcaagtatgataaaagatttgctcgaacaggaaaatccttatgggtatctgttaggtctgcaataaaaagtacctgtttggatgatgctctagaagtattcccaacgtatgaggatgctgaagctacactagagttattaataaatgattttgggggttacagagttggttgactatagtaaagtcggaaggcatagtaagactaaaggctcgaattacgagctagcaatagcaaagattctaacagcttggtggggagctccttttcatagggtacctgcaagtggtggtttgcattggaacgcttctatgaacgtctcaggagatattatcactattcctgaggcaggttttcctttcgtagtagagtgtaaaaaaaagagaagagtggacgttagaaaacgctttcctcaacaataaagaaattaaattatggtggtcacaagttgttggtgatgctagagaaacaggtaaaatacctatgttaatctttagccgaaacagagcagagaactttgttatgttaccttacaatgaagatttcatcgtaaacttcagaacggctaaccctagagtatcatccgcagaaatgtatgtggagtacctagacgaaatgaagcgccctcatgggtttatgactcacactatcttattaaaggatttagctacatatcctgttaaagagatgcaacaggactttgaccctgagtattataattgggaagaagagagtatgctaactaatagaaatggtgagtatgaggaagagcttaaagtagagcctgaggatatggaagaccatatcgcaaacctaataaataaatcaagtctttaggaggataagatggaagaatttaaccctgtaagtttacctaagcattaccagttatcaggaggtaaagaggtactagattaccttgcagatattactaatgtaatgcctactgagttaagctactttctaggaaacacacttaagtacattggacgagcacctagaaaaaataatatggtggaagacctatctaaagctatgtactacttaagagactttcaagttagataccacttagttaatgaaaacacattttcaggtgtccgagtagatattaaatcttataaaaagcaccttaaaaatataggagcgcaaaacattagagatatatcagaagagctctataattttgcccacgatattgcagaaacataccctaaagaccgtcaattagctgtggcacagttactgcaccttgtagctgagtatgtaggtggtttgcaaaactttaaacctagtgagaaggacatttcatggttcttatacagcttacgccataaactagcagagctcattcaggatgtaaaagagaccaactaacctaactattatgttagggttttttgctttttatggtataatagagatagataaaactattatacacgaaagaggatagccatgaatgatgttagaaaaccgagaaagaaacgactaaccgtttacaatactgacaggtattttaatataaacctaatgttgagagaagaacttgaaagtaaagtgaaggttacgaagttaaatgaaacagatattgagaagcagatggatgagctagagcttaaatccaacaggttgaaagttaaagatgataaagagtacctagtataccaagaaagttactctaatgatacactacttaataagttaatgaaccatgcaggaagcctaacgtactacacagatacaacagtcccctactatgtgattaaagggctagcaaacaatgtcacaagtgaagctgtctttagttctagagaggattttacttatgatgaaatagataatgtagccttgacatcttcagcaacttcagttatagttgatgtaccagttgtcatacctgatattagcccttatgatattttgtttatgctacatccgttaaagaaccatgtagataaagtacagttatctttttcctagactgagacctaatgaaatgtctgagagacataaaaaatattatcataaagttggggatttttacgaagtaaaacctaagattaaatacaaatattttaaacacatacagacttcgttaagtatttggaaaatgaatatctacattgtatgtgattccaaagatgactaccaaacactagacaaaatggtacaaagagatttagacaaacgaaaccctaacagagtgaaagatagggtgagttatgatggctaaacaaaaaactattaatagagcagaactagcaggcatcatatcagaacatacaggatatacaaaagaagtggtaaaagagatactagaatctaaagacttagcagttgcagagttaattgctaaagggtattcaataaaagaccataagatgtatagactagatataacaacaagaaaagagaagaaggcttgggatggtataaataaaaaaagatttattgtacccgagaagcaagatattaagtttgtccctttagttgagctaaaggatgctttagaaaaattaaatgaaaaagcttgacaagcaccagtgaatgtggtatagttaactcatgagaaatagggttagactataaccacatttacttgtctaaacacctatatactataaggaggagccatgtgaaagtattattcctacaagagtacgttagggatacgcatatagtgtcagatgagcaaggtatgcgagcagatttcttgtctactaatctaggtaagaaattattaaagtatgctcgaagtattaaactcaaacaagaagacatttatgtggactacacgtatgatttgatacctgaggttatgaaaacagaccctagaactggacgggttattaagtataaagaacctaaccaaactttaagaaaagaacctgagcggagattaactcaaagaattatggagttaaaacctgacattattattccaatggggaacttaggggtgtaaatacaccttaggtgtgcaggctattactaaacttcgaggacgacctgaagaagtcaccttgaagctaaaagatgatgccaataatgttattgctgagtatccaacatgggtgctacctatttactcaatggaatacatcacagcacaacctaatacggaaagatttgtccaatcagatatgaatgtgttacagaagtttcttaaaagtggttctgaagcgtatgtagcaaaagacactgagtatgagtttgtttctactatcgaaagagtacgggagatattcaatcagtttaaaactatgagaatagggctaactgtcccttactggttagttgcatgggatttggaaacaaatacattgaagcctgagcttaaaggagccaaacctttagtaatttctctaagttgggatgactctcaaggggtaactattcctcttgaacataaggagttctcgtggaaacctgaggaattagctgaaatctatgctatgattaaggatttccaagaaaataaagatattattaaagtaggtcacaacattcagtacgatattcggttcttgatgagtacacaaggatttacagacttcactcagaatagagatactaagattggttactatttagcaatcagtcaagattctaaggtatctttaagattatctgacttagcctatgagatgacagatatgggtggttatgataacccgttagaagcttataagaagcaatatgcagaaaaacacttagaagctgaaaagctacgtgtagttgctgagcacgaacaagctatcaaagattgggagcttgagattactgaaattgaggaaaaagaaaaagaactacgagaacaatacattaaagagggtcgtaagttatctcttattcctaagcagaagaaaccgccaaaacctaaaaagcaagcagttaaacctttagtaaacgaaattgatgggggagacttcaactatgaatggatacctcttgaaatgctacacccctatgcttcaggtgacgtggactgctgtagacgtatttattatactttagagcctaaactgaaagaaagtgaccgtatgtggtcattattcacagatttttaccctaggttatcacgagctttagcgcatatcgagagtgtaggtgttttagcaaacttggactacatgggtaacattgaccgtgagtataccaaggaaactgaaagactaacagaagagattcgaaaaatacctatcatacaagagtttgaacaacgtaatcaagagttgtatgaaatgagtattgaacactttgttaatacaccaccacaagaacgagataaaacgcttgttaatatgcgtacccgttttaagaaaaatggaactaagttcagacctacatcttcagatgataagaagaaagttttgtatgacatgttagggataaagcttccttatgataaggaatctattgtagatactgcatgggatgcgggtatccctgaacaagagcttaagtggaaccactataagtctaataaacacaacttagggcttattattgagtactacgaagagcatagagcccttgctaaactgttactagagttctctaaggttaacactttaaagaataacttcaccactaaattattagagcatgtttctaataaagatggtcgagtacatgggtctttcaacccaacaggaacagaaactagtcggctatcaagttcaaatcccaatcagcaacaattaccttctaaagtgggtgaccctagacggtttgattactcttacccgattaaacggatgttcacgactagttttaaaaatggtgcactactgcaactcgactaccaagcactagagatgcgtgttgtagctttaagagctcaagatacgactatgacccaagcgttcttagatggtaaagacttgcatacaaacacagcatcaattgcatttaatgtacctgagagtgaggtatcaggggatatgcgtaaacgagctaaaggtgttgcctttggtttggtatacggggaaaccccttcatctttcgcacctaagaatgatattactgtagaagaagctgaacagatatttgagaagtttctatcaagtaagcctatgattgaacaatttatccaatgggcacatgcttttgttcttaagcacggatatgttgaaaccatgcaaggcttcagacgtaaccttatgggagcttattctaaagataaacgtattcgaaatgaggcactacgtcaatccgtaaacacaattattcaaggtacaggggcatttttaaccaacttatcagtagtctttattgatgaatggttaacacaagcagggatgaagtcaaaagtagtccttactgtacacgatagtattgtaatcgactctcccctgaggagattgagattgtagctaaaactgctaaaatgattatggaaaatttacctgtagacttcttgacagttgattggattgatggtacaatgaaacggtacccaatcgaatcagatgtggagattggggaaaactataacgacatggttgattataaccctgaagagttagcagagttcaaatcagttaaagggtacgttaagtattataaagataaaaaaacttttgctgattatcaagataatggtctgatttcaaaagaagatatggagaaaggaaaagcagtagtagaagctaacagacctagctatctatctattgcataggtgacataatggacgaaaaagaagatttgactattgatgacgaggtaaaagaccccgaggaagtagcacctacagaacctgagacacctgtagagcctgagaagcctgttgaaaagcaaccgttacctaatagcaaagctattgagaatagagataatattgttaagggattagaaacacaaattcctgaagcaattaactctatggtgtcatatattgacagtctgattgcttctaggtctaagagtgaggagccttctgtcacagtaggtgataatttactatcattagcattaccaaacaactcagtgtatccatcctatgacaaggagctaattattacgtctaccgttgagagatataagaatgcaggttacgatacagcgctcattcctacagaaactcaacaaaaaatcccaagttacattattaaattaaaaagagatacaagaaaaatgtaatttagggtagacaaacactaaaatatgtgatatacttagtaagtactaagataaggaggggcgacatgggagacaaagaaaaatttatttcttatgcgactgatttgattgatggcagtgatgttggtggggtaacctttatcgacaagcctttaattgagatggtcatgcagagagaacctaccgaggatgaagtaaaatccatctttaaggagcttgaagctaagtacagtgttgagaattttgctgtacaagtagttaaaggcactacaggtaaggttttgattatcactaaaattgctgatgttcgagaggacggtgagtagttttggagattaatgtaggaatgtttgacttcgataagattactattaaagatggtaatggagacagtcacacatacgatttaactgaggagcttagggttaacgagtttaatgtagtaaaagagttctcagagcagtcatctaagtatgtttattgggcatctatcctagaaaaagtgaagatgtacaaagagtctgcggaattaaaagcagaaacatacagagcaagtatttatgaacaggcaaggttagctttagtggacacaggagttaacaaacctacaaaagaacaggtaagcgcacagattctacaagatgagtcttatgttaagctgttagaaggtgtaaatacttatacctatcttgttgggcaactaacgtatgtggttaaagcatttgaacaaagaaaagacatgttaattcagtatggtgctgagttgcgtagagtaaaagactatgaacgtggtatgaactttacaaacagtgcacctaacaactattagaataggagagattaaacaatatgaacttccaacaacaattacaacaacaactaggctcagtaaaaacaggggactttgataacagtaatcgtcccgacaaacaattgaagcaccctaaattgtattttgataaaaatactacaacattgatgcttcgtattttaccccctgtagcacctgataagcaatttgctgagggattccgtagtattttcataaaaacatatacggatgcaggtaaagaggttcctgcttcaatgcaactgtctctagcacctgacatcaactctcctttagagaacgctattaatgattggtctgctagaggtttattaccaaacccattcagtaaaaacggggcacaacaaaaaccatctgttcgtttcttagttaatgcggttcaagtacaactagaccctcagacaggctctttccaatatgagactgaccctgtaacaaaagagctagttgttcacgtagtagagttacctcaatctgcctttgcagaaattggggctaaattgcaagaccctgcgtttgcaccacctcaaggacaagaagttcctcctgaagttgctcaatatagcttcatttcagaaagtaacgcttacgctttgcagattgttaagcctgctaaaaacagtggtaagatgtcttacgatgtgaacgttatgcaatcagttcaattaggggctttacctcaaggatggcaagctttatgcgaagacttagcactacaagctcaaccaacagagcaacacagtgcagacttcgtaaccaactttattggatggtttaatgctcgtagcggtggcggagctccacaagcacaaaacgcttttgggcaacaaccgaacttcggacaacaacctagttttggacagcaaccaaactttggtcagcctgcacaacaacaagggttccaacaacctgctcaacaagtagagcaacaatatacacctcaacaagcggtagcggatgtagctcctgctaatgagcaacaaaatatgcaacaacctgtacaaaatcaagcacctgtacaacaacctgctcaacaagtagagcaaggtgctgagagtgtaccaccacaaccaagtgcaatccctgatattaactccttgttaagttctatgcaaggaagccaagggtaagtaaagcaggggacaacagtcccctgtaatttacgtttactagtaaactgaaataggggactgaatacttttattaggagagatattcagaatggcaagacaaaaacaaagtgaaaagaatgctacaggcgcaactgtagacttatcaacagaaaacttaggactaactaaattctctgatacaagagaagctaagattttagacattattccaacagggttacctaatattgactttatcttaggtggcggactaccttttggacgtatggcagaaatgtatggtaaaaactcaagcggtaaatctactattgcaattcttatgtcaggtatggcacaacgcatgaacgtagatgttgtatgggtagacgtagagggtactactgaagcacaacggttaatcgaatgtggtgtagaccctgttaagaacctctatcatattagacctgatgagcctaaagcaggaactaaaccaaaaccaactgacggtaaattcactgtagaggacgtaggtagcaaagttattgaagtaattcaagcttctgccaagtcaggtagacgactaattatcatttgggactcagtagcctctactccacctagagcacaattagagggtggtatggaagagaaacaaatgggtctacaatctaaagcaattaccaagtttactactttggttgggcaagagattaccaactcatcaaccctgtttctagcaatcaaccaagctcgggatgttattggtggatacacaccttctatcgagagtgcaggaggtaacgcttttaaacattgggcaactttacgtttagaaatcactaagggttcagctattgcagaacctcacgttaacgcttttggtaaaactgaaaatgttaacagtagctttgaggcaggtattaagattaaaaaatctaaagtatctacccctaatagaaaagaaacttttatcctaaatactgaccacggaatcaacttagctgaaaactattttgagttagcaagtaaaccatctaagtatggattgatgactcgtagtggagcttactaccaatatgtaactgaaaatggtgagcaactatctatgtataaaaacgactggattgcattcctagaatctcctgaaggtcaagctgtgcgttctgagcttgttcagcgtatgtatatgataactttccctaactggtacgcaccgttagacaacgaagctatcaatattgagttaaatcctgactttacaggcttacgtgctcgttacgaggctaagaagaactcagaaacacaacctgtagtaaacgctgaataacaacgacataaggaggaaaacatgagtagaaaacaaccactaagtcaagtagtagatgcgatgaattattatagtagcagacgggaatctgctactaattctcgcaaagcccctacctcattcggagaaatccgtcaaatgtttcaaaatgcaatggacacaggcacagaggtaatcattgaaagctcagagattaataacatgaactctgttagattagtgattgactatgtgggggatagatggtgcaagggttataaagaacaacgctactataacgaaatcattcgaatacctcacacgattagttatgctgaagtttatgtctctacccacgaagtagacagaactaaagcaaagactaaattgttcttccgaggagataacccttttgtctagggatatagataaagagcaagagttaatcagaacaggaaacagatttgtaacagaagtgggtagctcaacaggtgtgtttcctcgtgatgtagatactttgtttattaggtatgaaaacctgagaaataagatatatagtcagtacagctcaatgtatagcgacagtgttactagaagtgaactgcgtagttatattgatgaagagtttgttaagctatgtaaggagtatgaaatcaacggagaagttgacttcccttattatattaaaacaaaacttacggctagagtcaaaggaactttcaactcaggtactattcgtactagaaaacgtgagcctttgggtgcaaccgagggtgaagttgaaaacatgttggatgacaatgtttcaccatatgctactgttggtttccaagagttagtagatagcctcactgagggcgtttccttgagccctatggagcaggaaatactatcagtaatggtaacaggtgagtggacagtaaaacagcttgtagctgataatacggctaaatacgatgtgtctaaaaagcaagtacaagaaacaattgctgacattaaagagctagtagcacataagttaggttatctaagataacctagctttttttgtttcgagtgctatattagaattagaaaaaggataggaggtaacaaaaagatatgaataacacaggaacagaccctaaaacaatggctattgttcggctagtagctatgactatatcatgggtaagtttacttttaactagccagttcggatgggaaccatttcctttcacagatgagcaagttaatatgggaattacacttgtgctaactataggtactagtatttggagttggtataaaaacaaccctgttacacattacggtgtaaaaaaaagaagaaaaaggtatagctaaggtcggtacaagacaagagtttaaagaaaaacaaaaagaggataatcaataagaaagcgaggattgagcaacatggcaacagttaaaaaatttattgacttgattgaaggttcagaccctattgagttagatggagtttacttatgtgcaaccactgaaagagatgggttcacagaaactcaccaaggaaactactggtatttagtagaaaaagaaggagaagactacaaagttactcctagcaactataacaaagacctagatgcgtttgagaagattgatgcacctatcatcataacagaagacgactttgtgttctacgttgtaggtacaaacagagatagttatactttcccaatcttgaagaaagaggaagttacttcagcagaggttcttgaaaaacaagtattgcaagcattcttggcgtttatcaaagatagattccgtttcggtgtttataatatctttgtagtaacagaaccaactgtagttacgccctgatgactcccccgttgatgtcgggggtatcggagacttctctataggggagtatactatacaataaaacaaggagtgataacaaatggcaacacaagacgaactatacactaagttttctacaggaaagaaacctaacggtgatgactttaaagaattaatcgactttagaggagctgatggggctaaaggagacaaaggtgacacaggtgctgttggcgctaaaggtgacaaaggtgacaaaggtaccgcaggagctaaaggtgataagggtgatgcaggggcaaaaggtgcttctgttaaatcaatagcattcacaacaactgacggtaaagtaactgggggtacggctacacttacagataatacaactgtaccagttacagtaactgaatcctaatcaaggaagaagacaacttaaatagttgtctttttttattgacaaacactataataggtggtatactctaagagtaataaaaatataaaaataggaggtactgtatgattcaacttattacacgaggtaatagtcaggggtacctagcttcgtatgtgcttcaatcattgttctcagataaagaaatacacacagtgattgacaactcatatacattgtcaggtcaagactttaaatatgaccctgaggcggaagctgtaattatcttagggttcccatataagcctaatcaagaagttatgactaagaaagctttagagaatgtagctaaccccttcacactggtgttgcacatatgtagctttggtgaccgtatggagtttcaatatgtaaactctatcgtggatgaagtgaaaagccctgtagctgtaatgcttgatttcttgatgcaaggacaatctgatgactttatcagtaaagttgttccattaaagagtcaagatatagaccgagtgcgttcgtatgtagaccttggggacgattaccatagatatgatttctctatcaaacgaacagtagacccgataactttcaatgactttcttaatttttatggagagttcacttatagtattgttggggaaaagactttggcggagttactagaatcccatagaactgagttcaaagctcttaatgttaaaagagagaactatatgaaacgcaggttacagctagctgagataaagttagcaggtaactatttagttgcgattttatatgcagaggagtatcctaatgagatagctcactggttaatcaatcaatatggtaaagcggggatgcaaaaaatagttgtcctagttggagataagactaaaggagacgatatgttcagagttcgtactaaaggagctcatgcaggggaagtagctaagtaccttaataacggaaatggaaaagaaaacgtaggtacagtattcctcggcaatgcaagtaagcatacggctgaggttgtcataaatatgctatcaagtttaccataaccactaaaatgtggtataatgatattgaggcaaatattataaacattaggagtgtacaaatttgacagacaaaaactataaatatgaacgtgacgagctacaagatattagcgttatggaaagtatcattacaggatacatccttagaaactacaacaaaattcaggtgggtacattcaacaagatagctactacattgggtttagacaaacgaagtaaagacagcattgttgctttgcttgagcatatccatgcagaccctgcacttaaagagtggcacagtcttgcaattgaggggcaagttgatgtagaagacttagaacagtatacttcttttgatgaggatgaacctgttaaacctattgaagaaaaaaggaatccaacaaacagtagccccttacattttagctaacgaggaagttttagctaacaatcgtgagtttcgggaagtacaaagaacaggtgcacatgttgaacggttatttaatgggttgaagtcttatttagcagacgagttcaccaaaaatgacattgctaccccacaatacattagacctaaaggaacagacaaatttgcagaaaaagaattagtcctaggactatcagattggcatgtaggggctcttgtaacgaatcctgatacaggagggtatgactttaacaagctaactaatagagtgtctgagcttgctgtagaggctgttaatacagctcatgagcagggtatcaaccatatccacgcatactttattggggacttgattgagcatattaatatgcgtaatgtcaaccaagcgtttgaagctgagtttcctgctacagaacagattgctaaaggtattcggttaatatatgatgtactagtatatctttctagtgaagtgcaacaagtaacctttggtattgttgggggtaaccacgaccgattccaaggaaataaaaatgataaagtgtttaatgataacgtagcctacttaacgttagatatgctattcttctttaaagaattaggtacattacctagcaatatcactttgattgacaaccgagaagatgtgtacagctttgttgatgaggttgcaggaaaaacaattaaagtagttcatggggacatggaagctaaacgagaggacgttaagattcgtaaacacattcgtagagatgatattgactacttaatcatgggtcatatccatactactcgaatcattcaggaagactactctagattccatatctatgtaggttctccaatgggagcaaataactatagctcagaaaacaacttacctacaacatcaccgtcacaatttatcttagtcttagataaactgaaagaccgaccaatgtttaacccgattatcttataagggtgttgacaaataacctctagtgtgctatactattagtatattagaggtttttattttagaaaggagacactgaatgaaaaagcagattaaagataaagcatctttacgagcattcacacaatctatcggtaaaatagtaccagtgaaagaggtatttatgagtgggggagttatctatgtcctcaattcagatgatggaactatttgtagactaggtattggggagcaaccctactatgaatatattagttactacaatttaccaaaagagagccagttagctttacaagtattcttgaataagtatactgtatcagagaacatgaaggatttagctatcacagttaagttttttaaccctgattactccatgaatgagtcttatgagtgtagtcattgtggtagagagctgaatgtaacaatggcacaatcttacgatgggtacaatgatatgcctatatgtattagctgtatggatgctatgccaagtttagataaaaagttagcagaagaaatgaataactatgatttagtgactgtccgtgtggatttaaagtcagcagaaactacgtatgttgatgtgaaggttagtaaagaagtagataatattgttattaggtcaatgcttcttgttgcagaataccttatgactagtactgactttgcagtggagaacttgactattgatgactatacaacgttaggtcgtgacccaaaaactaagattaaatgtcgaggagaatatgtagtaaaacctttacaggaagtatttgcgtatactaacgtagaagagattgggataatcggttacccgatggtttgggagcaggtagaaaaatgattacaagaaaaacagttgaatatgtattggctcctagtgagttaaaacataaattccctattgggtctacaatggtataccaagataaagaatggacagtagtagggcatggaacgcccactctgagcacagcatttgctagttttccatttgttattattgaaagagaggatgataagtagatgggtacagaagttattgtagtaatggttgtatttatggtagctcaagcagttcgagctatttacgcttctttaaagaaagagcgggttatggttagagaagggggttctcctttacctacaagtgtatgggtatttttaggtattgaagttctgattgctcctttggtagtatggctaatggcactattactatcccctatcgttgcattgctacctacaaatatggtatggttgagcattatcgtagccatcatttatgcagtagcggttatggtaagccgattcgttagtgtaactgttgcttgggttgttaaaattattatggttcgtaagtataaaaaagaaattaaagacaaacaagagcaggaagtagctaactatcttagagagcaagtgcttaacaaagagtaactatgctatatttatgtataggagtgataatttatggatatggatttacaagcttcgttctcggagccaatactaagtttacctacaaagattaagacaggtgtattatacaaagatgtgcctgttttagacgggatagcaaacccaattacgggagaagttataacaaacaagcaggctatttaccttattgagcacgtaatagaccccaacagctttgatgttgctattgtatatgcagtacaggctaagtcagaccctcctgtaaaggcatttgaatctaagaaagccgtagtcccttacagacagtctactacactaggttccttagctcaaactaagggaataaaacaagagcgtagctacattgaggaaaaaccgccactctttgtaacacctatcatagaaggtttggatacatttacaggagaaccttgcttaggtttcttagaaagagaacctgataagtttactgcaagcggttctgtaacagaagggaaaccaacaaatgtgtttgtatcattagattcaatagagtggttagacacaagagtgcctacacgagacttgattgcagatgtagtagcaattaaggatgtgtggtttaacttatgaccgaagataagtttagagaagccgatatagtggctctcatcaaagaaatggagcacatgtttggggatattggggacagtgctctaatctttgagaaggctattatgcaacagaaaactattatggattgtatgatatgcacacagaacaagggtgttattggcattgagattaagacagaacgagatagcacacaacgactaaataaacagttatcggactatagtaaagtttgtgactacgtatacgttatgtgtcatgattctcatgttggtaaagtagaaaaaatactaaaagccaagaactataatcatgtaggcattattgcttacatacaaatagagggtaacaccttgggtaggtatttataaagaagcaactaagtctcctgttaaggacgtataccacacacttaatatattgtggcgtaaggacttatctacaatgttagggacatttaaacatattacctctagaatagaggaagcacatcctgaacttcaaggggctagttatagtaaccgaagtggtggtttaagtggagtagtcaatcaaccgttagtcagtcagaatgcacgcaaacctgtgcttattaatgctcttatttcaagattaggtcaagaagaggctaacaaggtattctgtgatgtaatgattaacaacagaaatcaccctgaaaagtcaattaagatagagcattttaacccaaaggaggggatataatggcatatgtagttcaaatagttcctacaggagcagatagacaaacttactctcttaaagagggtaggtgcattaaagctcatgacctagatttacatttagaatggttatcagagcaagggtatgatagtgagagtctaacagtagagcctgctaagatggatgagtatagcaaggacaaagttaaaggttcaggttgggtcttagagctagaaaatatagatgggtttattattactaaaaagtcataaaaagggggaaacacaatgaatgagatgaaacatgtattaacaggtgctgaggttgaaattggggacacaataacacttccttcgattactgaggcagtatttattattgtggatgaccctaagagaggtaagtgcttgcatacaaagtcaggcacatttgaagcgtttgttagcttagccgatgctgaacactatgggatggttcgggtaaatggtaagtagcggacgtaaatatggtgacataagtaaccttatggggaatttacttggtatgggtgatggtagtcaagcatacaaatctcaggtaaactccctaaagggtattactatgtagaatttaataaaaaatatcgaggtgtatctgaaaaggacatagctttaaaagagaagtatgctttagaacttgtatccaagcatataggaagccatcaagattttattagattgacacctaagaaagaaaatttaactgaaactagccttgatactgtgtactatgtacatagaggtaaagccatcattggcaaaatttcaatcagtgtgcggagatacggtaacttaaacgagctcattttttatttatcagaagaaattcctacgttcgaaaaatacaggcggaggaactaaaagagcaaactctagtagtcttgctaaagctagagctaacaaacgtaaaagtaaccgtaatagaaaaccaacacaaaaaagaactttataggagagtgtaagtatgttaacaatgaaacataaacaaagctcattgaactacctagctaaagcaattaaagcttctagtggaggtggtcatgtattcagaaatgatgaattatctttggtggggttagcttactccacagatattctagaagaggaagtattatgccatactgcattaaataatgtgatattccaaggagacggaatgactgctaccataacattaaaaccattacctagtcaagtacccatgttaaaaacactggaagaaagttttgctttaattggtgggggtgctttcattgatgatgttaaagtcatggaacctgtcttctccactccactagacgtagatttgctaatgggtaactctatgttttcaaatatccaagactacaatatggaattgcatttagagggggctgacgtgtccttcatggagactaagttcgcaggagaggtattataccaattcgtaattgaatcgtctctagaggctactacgggggatattaagcaacatctaacactattgttcaagcctaaggtttatgacaatgaaaacttgtttagtactctgttagtcttgaacaaagatggagctccaaagcctaaacttgataaacgagatacaaaaaaattgcttgatattatcatggagcctaatcttacaggactgctattaggtagtgtaatgttcaaacctcagtataattcgattactgctgttgtataccctctaaatgctaacatgcagattgccgaggcagaaaattcttatcatgtgattgcagacacaggaaccattatcgtaaacaaaaaagatattaagtattccacagttaaaaaagtgtctcaaggaaaatatctattgtctatctatgtatctgacggggtacttagattatctctaggataaacttgtaaaaagatgtgaacttcttgttgacatcttttttttatttgtgctatagttaattagaacttaaaaacaaaggagaaatgaactatgaattttgattttacaggacatgcagatgcaacactgaaagatactgttaatttagctgtcaaacaattagaggagtcagacactccacgactatacttcccatgcaaacgtgtaggtgacgaagtgaacgatttgcagtatcattactttggtcgatactacgaagaagacgagattgtgacaagtagaagagggaatatcattagtgcaggtgccacgttcagtatgaagaacttgacggaaaagcctgagaattgggacgagacttggggagctttttacattgatgaaaaagacaatacagggtttaaaatttatattgtagttcctcatgtaggagtaactgactatactatctcttatattgaatacagcattgtaaaccgagtattcaaatatactagaaacttcaaagaattaaaacgtagttacaaaaacattcaagaagcgttctcagaagtttcttacgcacttaagattaaaaatatcttgttcgttttgtcaccaagagcaacaccgatgttctactatgacatgtacacgacaatggctaccatgaataaagaagtggcttcctacattggtaggttcttagagcgactacttcaatattcttggattgaggttctttacaagtcagggctacctagaactacagtcaaagaatatatgtcagactttagttacaatgagcgtaattatctagatactagccaaacgagtgcacgtatgatgatggggttaccaaaaccattatggaaaatggcattgcgtggggagcttgatgcaaaacaactacaaagtttttctagagaagctaagacctataaagagtatgtagaaaatgtgaaacgtggagagttttcagagtatttccacatggatagctttgactattggttagaaagccgactccctgaggtgaaagcttttgattgggaagacatagatagagatgttcgtagacggttagaatggagaacagacagctctgattactattctatgctacgtgaataccgagaagaaaatagccgtatcatgactgataatattaaggctatgagtcctaaggtgaaagactactaccaaaaactatatgataaagaagtgcaggtacaaagtaacaaggctaaagaaactatttcgaacaacattaaagactacgatattggttacaagttatttatgcaggttatggatattactaaatctctaaacaaagagtatggagtaaaccacacagcccgagttgtaaatggtgagggtggttggttaatatggaagaaggaagatacttccgctattgcaatccatttaaaacggggatttgaccttaagagagttgttggttatatttactatcaatgccctcttgaccaagggttcaaccttcgaggtactaaaagttattcgtctcatgctttctctgatacggggaatactacgtatcgtgattatcttgacatgatttctagatactcaacaacctatgacaagtacccacgttatcttaagaccgctcatgacattgctgtagctaacgtaaatctgactaaagactcagactttgtagccaagttagagagccaaacagctaaaatatctgactacgaaagtgttaagattagaggggcaaaatacaaaatcattgtacctcgaacagttgacgacttcctgtcagaaggttcagacatgggtaactgtgtagctagctatgcgcattcagtggtttcaggagctaaacaagtcatctttatgcgagatattgccaagcctaataaagcattgattaacattgagattaggaatgggactattgttcaagcagaacaacggtttaatcaagctgtagatgaaaaccacaagcagtttattgatgcctttgctgagaaagtagggctaggtaacaacgtttggggtagataatgaagggagaaattatggctaagactacaaatattggtagtcagctacgatacaatgcagaagaggatgagtatactagaaaatggttaagtttgctagagtactacaatgcgttcggggttcctgtaccccgatactcttctgattttagaacagataaatctgtatgtaagtggtgtggaaaacctttagagggtaataagcagaatttttgttctaaagagtgtgctgacgactattcatggcgtgtaacggagagacgtacactacctgcactcccacaccgagttgcattgagagacaatttcacttgtatctattgtggtaaagatgtagcatctactaataggcacggtatgcggttgcctgtaagctcaggtgattgtagctgtgaccatctaatacctgtagctagaggaggtactgaccatattagtaatctaggttgtgcctgcaaagattgtaattttaaaaaaggggtattgacaatagatgagttttatgttaaactagaggaagaaagattaaaggaggaaaataaatgattacgaattttcaagcagtgctaattttaattgccttttggttattatgctctacagttgctcaggtgtctaaagaccgtttagataaacatgtagctaagaaatacacggaagcaagcaagtctcaggaggagcctcttaaaaagggtttagtagcagtagagtccatgtcagaaaatgacattattaatagtgctaaaataaaatacaacaaagatatgcaggacatgcgagatagtatcgaaggtaacgtgtacttactgcactactatgattctgtagacacagcattgaagaatgttagtatggcaacccgaggcactgaggtatatgtagacaacttagcaaaattaaaacactttattagtattgaggaagggagcaaaacaaaatgattagagcaattgtagtgcaacgaacaggagtaaatccccaagtctttaaaggcttatttaaagaacatggtcggtacttagtatatcgagggaaatcaggtaacttagttatcacaactgactatggtatggcatttcctgtagaaactagagatactcgtaaaaagttacgggaaggtaatgtatcgtttttaccaagtttggatgacatgacaccttacttctctcctgaatctgacttacatgagagtcaggctagagatggtaaagggttccgaattaagtactttgactcatatacagacttatataagcacgcacgtatcaatactagaagtggggtgcctaagcaggtcaatcctttaggcaaattgtacggagaggttaataaaaagttcagtttgttaaaatcaagcattaaaacagttgaccctctagagttggtctcttataacagtagtaacactattgctgattttaaggtagtagaccaactagtaacgcacttgtctagcttagggaactatgttaagaccttggcgcaaaaataccctgaaatcagcttggttgacattacagatgttacactcactgcattttctaagtatattttagacttaggggtgtacgatgctaacccttacagtactaaaatttcgatgcactctgcaccttcagttatgtaccctacagatgggtctaaagaggtagagaaagctactgattggactccatcacctgcggacttaccttttccttttggatttccgccattagatgcagggcaaaaggatacgcatgatattactaaaattatccgttctttaggtaaacaaacgaagttttagatgcaaaaaaggtcacaacttagtaaggttttatggggtagttgaaacgaattatttcatcttattaataatgacctacaaatgtttcatgttacacaccttagtataccctagaaaagtcacactacatagtaggacttttctaggattttaaggcaacatgaaataatgtgaaaactcgtgctatattataagtgaaatggtaattgcttaggcttttaccctgatttcatatactaatagagcaaaaggagtttgacatctgaaatgactgataagaagaaaccaacaagaaaaaaacaggctagcaaaggttctgttttgttacaactccataataataagttgctgtcatctaaggttaatgaggctttagatactaataagacatatgacgagattatggaactatgtgctgaatacgagttcgagataagtaaagcaaccttatcaagatacaaagataaacgtgaggaagctattaaaaaaggaatacctttagaagaagttctagacggacgtgttaaatctaaagtagttagtatctcaggtaaagaagttaaaagccctgtagagactagacacgataagcatgaaaaagaaatgtctgctcaagatacattatatagtgatattgagctacttgatgacattatccaaaaagggtttaatggtatgcagtatgtatcagtagtagaccctcaaatagcgatgaaggctattgagcttaagaaaaagattacaggtgacagcctacaaggaatgagcgtagcagggcttaaagagttaaatcttagaaacctagccttacaaaactcattaacggaagtcctgtttaaatatattcctgaggataaacatgaggaagtaattgaatacattgaccaagtagaggaagagttttacaacaatctagaccttacagaagaagaccgtagattaaacgaagctctaaaaaacactactaagctaggaggatagcagatggtatggaaacaattaagctataaaaagctttcattacaagaaacattagacaaactaatggcggggagtacattagtggttcgtggagtagagtctacgaataaaggggatattctagtacgcttagacccccgagcagtacctgtaactcaaatatcttatgatgtaggtcgagatgaaaagagtgaatactttaaaccttattgggtggtgtacgatattccatttaacttctttgttacacgggatgtattagagttcaccgatgattacaggctgtacaaccctaaatttaaagtaggggatactgtaagatacttctatgaggatggtgcaggcaacgcagaagtagatactgctatcgttaaagctatctttgtagatgaggacgagttattaggaacacgtaagttctactataatctcagtcgggttgaatacaacatcgaagaagctaacttaacgaaattataataaaaagaaaaaaggtcttgacaagttcagacctttttgttatacttagagtataaatttaaggaggtaccacaatgattgaagagactgataacgtaaagaaagttgtagaggataagggtgaggtaaaacgagcagaggttagttcctttgtagatatggcaaactctgtcttagataaaactcctgagcttaaggatattcctacagaagagaatattaaaaagtcacaggaagcttggaacaaacaatatggtggcacggagtatgaagagaaaaaagctagtatggctgttgagtccattgcaggtcataaagtgaagcgtgaaatcccttctgaggacttcagtaaatatcctcatctgattcgtgggattgaagcttatgggtatgaattggaagagtctcgtatgtttgagatggaagaagggttctttgcagttactgaccttgcaggtaatgacatgaacaaacctaaggcgttagcttctagtggttatgtcgttgaaactgtaggcgtaggtagcgctgttgacaaagaaaccttagaagtgctagtagactcaggttttggtattgtggttgaaaagttagatacactaattgaatctcttgaagagctatctgttaagatggataacttaggttttaccgaaacagaacaagcgaccttcaaagacttcgttgagaatatctctaaaaaaggtaaaccaacgaaaccacaagaaagcttagcaaacggttctgtaacagttaataatggtgaagttggggcaatcgtacacaatacagttaagcgcacaggtaacgattttacctcccttgttattgacgatgaaattattgtagaggacgaagagtctgcggatgaggtagaaacaaaagagcagtcgattctagagttcactgaacagaaagttattgaagattataagaatggaatgtctactcacgatattctagaaaaatatgatttcagtgcaggtcgtttgtactctattctaaacaagcataaagtgccgtacagaacgacaggaggctctacagggctcgcaggagtccaagtagctgagtacctatcagatgacaacaaacgcaatcagttgattcgagcatatacagacaagaagatgactctcaaagacatttatctagcatttaacattactaagaatggattgttctatatcctagatacttataatgtgccaagacgtatgccttctcgtacactgaacacgattaagtagatgaagatgaataaaagagtgtacccctagtgactttactagtcatcgggggtatgataatcggattcgtgttgggctatacaataaatgtagaccgtcaggttgaacgagaagtcaatttcagactggaaaggatgctgtcgaatgaagaatacccgaacaaataaaaaaggtgttggttggtatctattaaaagagactttaaaggtagttggggaatttttactctatgctgtcctctatgctgtcctttatataggtgctgtaatagttatgggttttatctactattgggcagtaactatctcttgggttggtacaactattctcgtaggcataggtttgtttttttgcactaggagtaatagcaatgataatcagcgtgatagactggttcaaaatgaaatataaggaatattcgaagtagctagattaattagctacttttttttgttttactgttgacatatagtaggcggggtggtattataaatatatcaagtagctcaccactaaaaaacaatttaaaaaagttaataaaaagtgttgacaagtagatagctacatggtattataaatatatcaagaagataacggagggaattaattatgaaaaaacgagcaggtaaaggtaaatcaaacttagtatgtggggcatgtcgggatgtagcaccaatctttcgaccatctatgcgaggacgtgaagtagggcatatcaaacatatgtattgtgccaaatgtggagttgaacgaccatttattgaacacacagcagataaagttgaaacaatgtgggcattggaagctatcgactcatctaaagaactagggatgctaactcgtatgtacaacagtaacacaggagagtttttgacacaagaggaacaaacagaaatgttaattgatatttgtaaagagttggaagcagaaggattggactggaaagtagacttagtatgtcggatgttagttgaccgtggctatgtagtgcacgtattacaagattttcgaccaaatcgaaaataagtgttgacaacaaaaaagatacatggtaatattaaataaatcaaataaataaacttattattggaggaagaatcacatgactaaaattactaaagagactcaaaaaatggttaacaaggcagaaagaacacaaaagagaattgaaaaacttaacacacaattgcaagacattgttaataaaattattgtagaagttgatgtacaaaaaacacaagtagttaacacggctaagtttttatcagataatgagcgttactaccgagatactttacacatgattgaactaggtgagaatttaactgtagctgaccaacaacgactgtttgcacaattacaagatgctgtacacgcaagacgactaggtaaagatttattgtttagcctaggtatggatattcaggaagtaactaacgtatacaatcaaggttcaaatgctgttacgaatattccacataaagatattcctgtagtggaagctaaccgtagactaaagagcacagcaggacagtttaagtctcaaatccaagggctgaatacaagtaaggacttcaaactaagattcagaacaacaagtgacaatcgtgcatacctactacgttctagagagaacacacctcaacgtaagattattgttaagaacttagaccaaacaaaattgattgataaaaaatacagtgctgtaaagcaagagatggaggaaatgaatggaaacattagtaattaatatgggagaggcaatcaaacaagctcgaaaagctaaaaagatttctcaatcagagcttgctagccgtgcaggggtgacacaaacttatgtgtcattccttgaaaaaaggcacaacattcccacaaaaagataaattagttgccatttgtaacgtgttagacttggaaattgtttttgaacttaagccaaagaaataggaggtgtactgatgaacaagtaccaacatattgtagatactataaaagacaagacagactttgagttagagttactaatagatgggctgatttgtcacgcaaacaacttgcaggcaatacctaactatcaaggtatgcaagagtgggctcatgcgatgcaagttattgagattattggaatagcattatcagacagagaggaactacgttatgactacttacgatactaaaaagataggtaagattaaatattatcactttcctaaggagaacagcttttcttttcctaaagatatgtacaagtggtgggtcaatcagatggagagatacgttaatgagttcttaagtgttacgtatggcaagatgccacgtattcatgtgactatcaataacagattaactaccacacacgcttggtttgttacctactataaaagagcgtgcccaccgcacattgagatgagctctaggatgctcaaaggcgcaatgttactaacaggtacacctgatgaggaaggtgcttacaaagcaattgagagtactctacgacatgaagctatccattatgcgctatatcatttaaggttaccacactcagacgggtatgacaccttcgagaaagatttgttcattacagggacaggggctagtggagccactaatgagggttccgtatacaaaagtatcattcctgccactttgactacaggctacttagctatttgccctgtttgtggtaaagagaatgcaaataggacaacaggaaggtaccgttgtgctagttgtatgaaagaaggtaagaaacacatttatactgctaagaaagaacttatggttggaattgagtataacaaagagagaggacgaaaagaatatgatggaaactattcaggagaggttaaactcccacttaaaacaattaacgggcttgagagataccctcaatgagaacaatgtctatgcgtatgctgaaatcgtaaaaggattgcaggctgagttaaaagaccttagtgtggtagtacggctaccccaacttacagagtacctaacaatagtcaatcagttaaaacctatcttagaggcttatagcgctgttttaactaatgaggaggtatttaccctagctaagcaacaatacagcttagacgacatgctagccctattagacactgttgtggaggatgaccctcaagaattttactactatgaccctaaaagaataattgacatcgaagagtacccttaccaagtagctgatagggaaatcattttcctgacggaagtaccgttaggctatacaattggaacacttattaaattgatggaggacgttaactatgtataatttgtatcataataaagaaaaaggtgagttaaagctcattaaagttagcagtagtaacagaaagttgcatactacgtacaaagcacagccttcatatttcaatgattgctactacgtgtgtatggagcgtaaacctttaaaagagctagcaattagcattaaggagcaatggttaaaggaagctaaagaacgagttgaaatgctagaaaatatgaaggtctagaaaaaatttaaaaagttaataaaaggggttgactttctcagccccttactatatactaggtttataaacaagaaggagatgttaaatatgaacacattagaagcaattttaacaagtagtgagcaccaaggttcagttttagaacatgtaaaacacgagttgcaatttgacgatagaaaaaagttgaagctttttaaatcttggttagaagattacggtaccgaagaagatgaaaagtattttgacggaatgactgatgatgaaatcttattgtatatggaacttgatgacatagttgaccaagtagctgacagtacaaacccaaccgaacttggtgattggttagatattgactggacaggcttagcagaatcttacgggctataaggaggttattcgtttgaataggaagatgactacaaacattagaataagtacaactaatatgaggttcccaaaacttagaaatagaagataccgaaacaaaaagcaaatacctattatagtacctaggtattcagaaagtcaagtacaaagagaatctgtctcacatatattaaaaacacttactaaggaggaaaaatgatgaaaacatattggactggtgaaggtaaatatcaaaaagaatatcgggagttaatggataagtatggagtaaattggggttacacagagagtcctatcatgaacatgttaattgcaggcaacaaaatctattatgacttttataacaacggaggtatgaatttaccttggacaggttatattgaagactatggctatttaggggagttagtagctaaaatccaagaaggttgccaagaagttcaaggcacaccttcacccgatatgtacaacctaggtggtatttatgttgaaggtgatttagaaaaactataccacacattagagaaaacagatatggaaaacaactatgttaacttagaaaaagtcatggatgctattattttgctagcagaagcttatattaaaccgttccctatctatactttatactttgacttcgataatgagactatctcaagaactattaaattgaagcaaactattacttttggtgagaaatctgaaatggaagcttggtatgaccatcgggtgaactcattcaactacacagttgtaaattcagaagaagaacaagagcataaagctcatattgtaaaggaaactaggttggcttcataccgagaggttattgctaacttaggagagcgccaacaaacaatcgttcagaaattcaaagagtcaggtaagtattacacagctagagagcttgcacaagcattgtatgatgaaggtaagcttatcacaaatgaccgtaacatggtacaacctcgattaacagaacttgtgaaggcaaaagttgttaaagtagttggcaagaaaaaagatgtattgatgaatcgtatggttgctaagtattcattagtagataaatactatgaaatttaagtgttgacttttaaaaataagtagtgtatactatgtatatagtaatgaaaggggaaataaattatgaaacagtatcgtgtttacaactatgttaacttaggttcaggagaggtgcattacattcctgtacagaaccctgctgaaggtattgcagttattgatgcgttagctaactatcagcttaccctagatgaaagtattgtatcatctaatgcttttggtcttgaagagtatgacgagacagaacaagagtggtttgactggatggatgatgacggattccaagaagatgactaccgaaatgataagcaagttaaacgtgcagacttatggaaaatgtactaccgaacaccaacaggattcgagggattgcacttagaatcaaatggttttgaaggagttaccgctaatgaagaatagtaaattacagcgtatgtataatggtttgaaaggtggttgggcagtattgcctgacacacctacaaagcctgatgaagagtctaagcagacatatcacggtagctttatggagtatgttagagtgtttgggggtaaaatgttagcagaaggagttactttagctagcgaccctgatagcacaaacaacctcagtcagaagctatcagatgcagtatcaagtgggtatgttactatcaagaatggtaaatttattaaagtagctgacacacctacatgggtgcaccctgacttgagagttaaggagggataatatgatacaagcatatcgaatacatgtgcttatcaaattgcccgaaggggttagatatttaggctaccactttgcagagtttactagggcacttaaccctagaatattagattgggagttattgtctagtcttataactgattactataacagtttggaacctatacatgcgtattctattgagcctgtatcaactaaggacatattaggttattgctcatattatcattaccaatcagaactactagaaagcggagcagtaccaccacaaaagattactgtaccgttgaacacagcaagcaacatgcaactaattgacttataaaggggggaaacacgatggaaaagaaacagacaacacgttcggaagttgatgcgtatatcaaacaagaagaccaaaaacgtttagtatggtcattagtaactgcactgattgctactatcatctttgggttacttattggtatccttacctttgcaggaacttatgctttaatttttaaagcaggacaaggaagaggaagaacgtattgcacgagagtatgacattgacgaaaatgcttagggggtattaacatgaatatggctgtagtcattgctaagggttcaggctatgtattagtatatcaatcagtaggtgaatattcactttatgaggtgtttcgtaaagaatcagcacgagtacacccactatcagagtatgcaacacttgtatgggacaatgaatttaatcaagtagctgtcagggacaccttcatgggagttatccctaactcagagtatgaggaagtattatcttataaaaaagagctcttggaaacagctaaatactttaacattgagttagctaaaccattagaggatagacgtataatagacttaggataggatacctttaggataaacttaggataggatagacttaggatacctttaggataaacttaggatacctttaggataggcttaggataaacttaggataggatacctttaggatagacttaggataggatagatacaaaacatttaagggggaataactatgaaaatcacaatcactacagagttgcaagtaactgagatggagttggaagactatcttcgagttaagttctctagagctaaagtaggggacattattcgtatcaagtcaaagaagaaagataagtatgactatcttgtactcagtaagcgtaatgactatggagagtcttcacagagctactacggtaagtctaaatactcatacagaacttatcatgtagtaaacctaagtacaggttacttatggcgtgcaggtggggaagacctaacagactcattcactgaatggttcactcataatgacagcttaacaatcacagagcttgatgtcgtagactctagtgagttaacgattacaagttttaaataaaaattagcccttaagggcttttttattttactggatactaggttaacatggggtggtacaactactaggcatagttagccaagtagctgacagtgaaaattagtcaagtagctcaggacaaaaatccaccaagtagctgaccactaaaaatccatcaagtagctcaccacgaaaatccgctaagtagctgacagtgaaaaatccaccaagtagcccacgcactgagcccgccaccaccaaaattagcatacctgccgtatattgtcaaggggtcaattttcacgctttttcttgtattatatagtagaaaaaaataatttaaaaaagttaatcaaaagggttgacaataagaaatagctttgatatagtatagacaacaaaagaaaaggacgtgctaaacatggaaaacaaagcaatacaatatgccgaacgttacggcatacttgattatactataaaaggttcttacatggtttattatgcttcttatccatcgagcggacaagacaaacgaacaacttataaagttactataaaccttgagacaaacgaggaaaaaaagggaacaactaaaaaggtactataaaaaaggtgaaataaatttatatttatagttgacaactaaaaagatacatgctatactatggatatagtaaaggaacaaaacaaaaaaaaaagaaaaggacgtgtcaaacatgaacaacaaacaattatacattaaaaaaacaaacggggtaaacggggggcgtttcttcctagcagtagaccacacggcaaacacttttgtaacaggcaagacaaacggaacagcggtttcttatagtaagattgataacacggtaaaattaaacactgaaagagaaataaaagaacaaagagatttttatgaagcacggggctataaacaaatttcaggggaagcttttaataaaacaatttaaaaaatttaataaaaggggttgacaatcaaaacccccttttgttatacttatcatataataaagaaaaggaagtgctaaacatgaaacaaacaaaaaaagaaattttaattgatggtattttagaagcttgtaacaaggtagcaactgagacactaacagacaaggaaaaagatacactaaaacagtttacagaaaatcggttacatttacacggtagaagcggttatttgttttatacggtacagtggtttaaacgtgtatacattcatacaaattttggcggggctttggaactgatagcggaatacgtgcttaaatgtaatcacaaaacaacgaaaacaaattatatcagttgtgaagctatttaaaaaaattaatcaaaagtgttgacaagctgaaaaggctatgctatactaggtatataaataagaaaaggaagtgctaaacatgaatgaaatgagagaccatttaaaagttagagatatgaaggcggtggcggtgtacggattgacaaacacggcaagcattgaaattttaaagattgacgaacaagaagaacgggtatattattgtttgcggtgtggtgaacgggggcgggtatgcttcagtaagctaaactcaaatagtgacggttcattatactttattaatcgggtatggggtacacaagtaagaataagacttgatgagtgcctaagagtagcttaaaaataatttaaaaaagttaataaaaggggttgacaaataaagccccttttgttatacttagtacataataagaaaaggacgtgtaaacatatgaaattttttgattggattttatttatatcttttattcttttattggtggcgttaggggtatttttttgggtcgctagtagttagcttagtacaaaacttaggtatttgggacgttagggcgttagggctttcgggggttcttatttgggtttatattgccttacttgctgaaatttgggcaatcggtacaggaaagaaaaagttataaaaaagttaataaaaggggttgactttaaacccctttaatgctatactatgtatatactaaaaagaaaaggaagtgctaaacatgacaaaattaatagcagacaaggaacaaaaggaaatcgctttgatgaacgttacaaaatatgtagactttgaacattataaagaggattgggaagacttagaaagcgcaaaagaagactttgccgacaagctagaaaagggctttattcaagaaattacactaggcacatacaacggggcacttgatatttttacacctcgtaaaattgatgatagccacattttagatgcaattcttgccgacttgcatgaaacggatagctatgctatgcttaacgatatagaagaaactgaaaacatgacacaagcggactatatcagggcatacagtgaattatacactattttcgttattggtgaaaaaaatttacattgatagagactaaaaaaagttaataaaaggggttgacaatcaaaaccccttttgttacaataaaagagtaaggagggcgggcaatgattacagacgtacagttaaacatgatacgttttgaacttgctagaataccacgtaaaaatttagaacgggcgggcattgataaggttatcaaacagctattaaagcggtacaatatcaagaacacaaaacagaattataacagtattaagattttaattgattgcaaaaaataattttaaaaaagttaataaaaagtgttgacaagctaaaaaagctatgctatactatgtatatagtaaagaaacaaaacaaaaaaaagaaaaggacgtgctacactatgaaaacatacgaaaaagtaaacttaaagactcaagacctaggaaagacttacaacagagattggaaacaagacgtttttgcttataacatgacactatcaagaaacggcaagcaagcaacttttaaattctttacaggtacaggttgggacaaagccccaagcgttaaggacttgttaggtagtttggttcgtgattataactatacattagaggaactgattgacgacctaggctattcttataatgaaggtagcaaaatctttgcaaacattcaaagaaacaacgaaaaacttgacaaactattttcaagtgctgaaattgtagcactacaaacggaactagaagactattaaaaattttttagagggggggaacgtttttcccctttctaaaaaggttttaaaacttagtaaaaaagttaataaaaagtattgacaaactaaaaaccttttgatatacttatatcatagtaaagaaacaaaataaaaaacttaggagatgttaaacatgacaacttatcaaacagtagaagaacaaaacaaagcactagaagcgcaagggctagcagggtatgacaaaaaaatcactttagcttttcggattgcaaaaagaaatttttcgaggttacttttggggacttagatagtagaagccaagcgccttatttttcaacgggggcgggcgtgcttaattatgttcgttctgattggaaccaatgcggacaagcacaagaaagcgtgttgcctaaaaattcaatagcttataaattctatgaaaaatgggacaagaaacaccttcacaatttaacactagaagaggttaacgaactagaaaacgacttgcaagcattaaaagaaaaatatccatatattgaaaaccaacgtttctataatattgtagcttttgaccgtgaacaaagcaagaaaaaataatttaaaaagttaataaaaggggttgacaattaaaaccccttttgttatactaggtacataaataagaaaaggaagtgtaaaacatggaactaacagaaatcaaacaagcacaagaacaagggaacaaattaattgaatcatgtatcattaaatataacggggctacctataaatatgaaaacgtgaaaccatccgagattatagccgagcttaaaaaatggaatgggggtattatctaatgtataaaattaatgaaaccattgcaaagagtttagaagcgggggacgttatccaatccaaagagtttggatatattgaaatcattatcaataacgacaaggaagcgggaacactaacagcacaaggaacagcaagcgggacacctaacacgctaccatataacgcctataatgatgaaaattgtttcttgtataaaggcaatataaaccacattgcaaacatgaaataaattagtaaaaaagttaataaaaggggttgactttaaacccctttaatgctatactatgtatatactaaaagaaaaggaagtgctaaacatggaaaactacaaattgacaattattgacggaattatttcatcatggggggaagaaggacaaggggaaacactaggaacaaaagacttaggtttaaaacaagaaattgaaatgctaaacactgaaagcattgtaacagctattaataacttaatggggcttgaattgcaatcagaagacctttctttcattaatggggcttatggtatgttttcagtaattgaaaaccgtgaagcacgacctgatgaaaacggggcttacttagtagactatactttcacggttgaaaaagtcaatccattagttgaccttgaaacagtattttctaatatttaaaaaacttaataaaaggggttgacaaacaaaaccccttttgttatacttatcatataataaagaaaaggacgtgtcaaacatgaacaaaccatttgtaactagcagatactcaaagaacataccatttctaacaccccatattatcagacaaggaagaaaaaactataccgcttgttatactcgttacggggtatcatttgcaaaaacctttgcaagcctaaaagaagcaggggctatacttaaaagaatatgcttactaaaacttattaaaaaaagttaatcaaaagtgttgacaaagaaaaacaatcatgctatactatgtatatagtaaagaaacaaaacaaaaaagaaaaggacgtgtcaaacatgagtaaaacattagaaaaattagtagtgaaagcagaaaacaaagggcaagcaattttaaatggtagaatgtggaaccaatacagccgtgattttgaagaattaagagaaaaatatgcaatcgaaaatgatggtaaaacggtaaccttaaggcattggggtactaaaacattagagattgacctagcaagcaaaagtgtttcttattggtacggtgaaagcaattccgaccgtgattctatgaacttcttactagggcgttacggggtagcgggttcattccgttacagacctagcattgatgaattttcttacaacgtataaaaaacttaataagaggggttgacaaacagcccccttttattatatacttatcttagttagtaaagcaagccaaaaattaatttaaaaaagttaataaaaacacttgactttctttcctaaccatgataaactaattacataataaagaaaaggacgtgtaaacaatgacaagactagtagacactattctatacaatccatctattgaagtcacaaacattgacaaggaagcgggcaaggtaacagttattgacttattcaacggcaacaaagaaagaatgttaaaactacaccaaagcaaacaagacggctatcaatactattttaaaatgaacaagcgttcttattggttacatttattatatcagaaagaggagggctaaacaatgagaacattaataaaaacatatgttcacacacaaggacgagcagagaaggaactagaaatattatgcaatcagtacgctagccaactagaaggacaagggaaagagattgtaagcatagatattcaaacagtaacaacaaaagaagaaactagatattttggtacagatataaggatagaaggcgctacaattattatagtatataaataaggaagtgtaaacaatgaaacccgtaaccatttataagcttgacaaaaaagaaattgaatggtactttacagatgacgtaacacaaggggaacaagtttggattgcagacaatgaaacaaacggcgttaaaagtataggcactatattagacgttatcaaagaaacagaaacagcctactatatcacattagaagaataaggaagtgtaaacaatgaacgaacgtaaaacagtaaggagacaagaagagttacaagactgtataagaggagcaagaaacctcttaaaggaacagaaaagaaaaggcgtaacaagtgaatattatcaggaacaagcaaacaagacaagacaacgtataagcatatatgctcaagaactagccgacctagtggggcatatataagaaaggacaaggagggctaaacaatgccactaataggagaaaagaaaaacattgtctatagtacacaagggatagaacaagaacaacaagaacaagagttaagagaattagaatggattgaccaacaagaagaagaaactaaccgcttaacatggttattagaggaggaggaacggcaacgacaagaagaaaatgaccttttatattgggtataagaggggacacacacaaggaaggggggaacaagggacacacacaaggacgacacgggggcaagtgttgactttaaagagaagaacaaacagcaaggaaggaagcccc

SEQ ID NO: 3 - DNA, 147648 bp, Unknown
  Description of Unknown: VREML105 complete genome sequence
tgtccgtgataaggttccgtgtagctagtgccaactgattaagaatgaaagttttaaatagttcgtttgagttttgcatttgtaacatctcctcttctttagtatatacatagtatagcatgattgtttttgcttgtcaaccattttgattaactttttttaataagtttttagtaagcatattcttttaagtatagccccgcttctaaactctttgcaatggtttcattaattttatacattagataatacccccattccattttttaagctcggctataatctcggatggtttcacgttttcatatttataggtagccccgttatatttaatgatacatgattcaattaatttgttcccttgttcttgtgcttgtttgatttctgttagttccatgttttacacttccttttcttatttatgtacctagtataacaaaaggggttttaattgtcaaccccttttattaacttttttaaattattttttcttgctttgttcacggtcaaaagctacaatattatagaaacgttggttttcaatatatggatatttttcttttaatgcttgcaagtcgttttctagttcgttaacctcttctagtgttaaattgtgaaggtgtttcttgtcccatttttcatagaatttataagctactgaatttttaggtaatacgcttttttgtgcttgtcccgcttggttccaatcagaacgaacatagttaagcacgcccgcccccgttgaaaaataaggcgcttggcttctactatctaagcccccaaaagtaacctcgaaaaatttcttttttgcaatccgaaaagctaaagtgatttttttgtcataccctgctagcccttgcgcttctagtgctttgttgtgttcttctactgtttgataagttgtcatgtttaacatctcctaagttttttattttgtttctttactatgatataagtatatcaaaaggtttttagtttgtcaacactttttattaacttttttttactaagtttaaaacctttatagaaaggggaaaacgttcccccctctaaaaaattttaatagtcctcatcgtcatcattagcaaactgagaaataaagtcatccatttcaaaccataaaatatcgtttacgtctgtttctgtcacgtcttctttgccttctagcatagcttcaatttctgcttgcgcttctgataaaatattaagctctttgatttcgtttaatcggtcgttaccaccagaccacgcttcaaagtcctctaattcaattgtttttgttattttgatactcatataaatcccgccttttctttttttgttttgtttctttactatatacatagtatagcatagcttttttagcttgtcaacactttttattaacttttttaaattattttttgcaatcaattaaaatcttaatactgttataattctgttttgtgttcttgatattgtaccgctttaatagctgtttgataaccttatcaatgcccgcccgttctaaatttttccgtggtattctagcaagttcaaaacgtatcatgtttaactgtacgtctgtaatcattgcccgccctccttactcttttattgtaacaaaaggggttttaattggcaaccccttttattaagtttttttaatatctatcaatataaattttttcaccaataacgaaaatagtatatagttcactgtatgccctgatatagtccgcttgtgtcatgttttcagtttcttctatctcgttaagcatagcatagctatccgtttcatgcaactcggtaagaattgcatctaaaatgtggctatcatcaattttacgaggtgtaaaaatatcaagtgccccgttgtatgtgcctagtgtaatttcttgaataaagcccttttctagcttgtcggcaaagtcttcttttgcactttctaagtcttcccaatcctctttataatgttcaaagtctacatattttgtaacgttcatcaaagcaatttccttttgttccttgtctgctattagttttgtcatttttagcacttccttttcttttagtatatacatagtatagcattaaaggggtttaaagtcaaccccttttattaacttttttttataactttttctttcctgtaccgattgcccaaatttcagcaagcaaggcaatataagcccaaataagaacccccgaaagccctaacgccctaacgtcccaaatacctaagttttgtactaagctaactactagcgccccaaaaaatacccctaacgccaccaataaaagaataaaagatataaataaaatccaatcaaaaaatttcatatgtttacacgtccttttcttattatgtactaagtataacaaaaggggttttaattgtcaaccccttttattaacttttttaaattgtttttaagctactcttaagcactcatcaagtcttattcttacttgtgtaccccatacccgattaataaagtatagtgaaccgtcactgtttgagtttagcttactgaagcatacccgcccccgttcaccacaccgcaaacaatagtatacccgttcttcttgttcgtcaatctttaaaatttcaatgcttgccgtgtttgtcaatccgtacaccgctaccgccttcatatctctaacttttaaatggtctctcatttcattcatgtttagcacttccttttcttttagtatatacatagtatagcatagccttttcagcttgtcaacacttttttattaatttttttaaatagcttcataactgatatagtttgttttcgttgtcttgtgattacatttaagcacgtattccgctatcagttccaaagccccgccaaaatttgtatgaatgtatacacgtttaaaccattgtaccgtataaaacaaataaccgcttctaccgtgtaaatgtaaccgattttctgtaaactgttttagtgtgtctttttccttgtctgttagtgtctcagttgctaccttgttacaagcttctaaaataccatcaattaaaatttctttttttgtttgtttcatttttagcacttccttttctttattatatgataagtataacaaaaggggttttgtttgtcaaccccttttattaacttttttaaattgttttattaaaagtttcccctgaaatttgtttatagccccgtgcttcataaaaatctcgttgttcttttatttctctttcagtgcttaattttaccgtgttatcaatcttactataagaaaccgctgttccgtttgtcttgcctgttacaaaagtgtttgtcgtgtggtctactgctaggaagaaacgccccccgtttaccccgtttgtttttttaatgtataattgtttgttgttcatgtttgacacgtccttttcttttttttgttttgttcctttactatatccatagtatagcatgtatctttttagttgtcaactataaatataaatttatttcaccttttttatagtacctttttagttgttcccttctttcctcgtttgtctcaaggtttatagtaactttataagttgttcgtttgtcttgtccgctcgatggataagaagcataataaaccatgtaagaaccttttatagtataatcaagtatgccgtaacgttcggcatattgtattgctttgttttccatgtttagcacgtcccttctagcatgtaattatatagaggtataacactatctttcatagctagcatattattttctgtttgttctttgttatatagatataagctctttataattggtttcaataattcactaggtaagttgtttctttctttattagttgataatagcaaactttccacattatcgcaaacattttgattataaatatctgataacactttttttaggttttctttaatttcgttcatagtttagcacgtccttttcttttgttgtctatactatatcaaagctatttcttattgtcaatacttttgattaacttttttaaattatttttttctactatataatacaagaaaaagcgtgaaaattgaccccttgacaatatacggcaggtatgctaattttggtggtggcgggctcagtgcgtgggctacttggtggatttttcactgtcagctacttagcggattttcgtggtgagctacttgatggattttcgtggtgagctacttgatggatttttagtggtcagctacttggtggatttttgtcctgagctacttgactaattttcactgtcaactacttggctaactatgcctagtagttgtaccaccccctgttaacctagtatccagtaaaataaaaaagcccttaagggctaatttttatttaaaacttgtaatcgttaactcactagagtctacgacatcgagctctgtgattgttaagctgtcattgtgggtgaaccattcagtgaatgagtctgttaggtcttccccacctgcacgccataagtaacctgtgcttaagtttactacatgataagttctgtatgaacgttgagattttccatagtagctatgtgaagactctccatagtcattacgcttactgagtacaagatagtcatacttatctttcttctttgacttgatacgaataatgtcccctactttagctctagagaacttaactcgaagatagtcttccaactccatctcagttacttgcaactctgtagtgattgtgattttcatagttattcccccttaaatgttttgtatctatcctatcctaaagttttatcctatcctaaagttttatcctatcctaaggtagctatcctatcctaaagttttatcctatcctaaggtagctatcctatcctatcctactaagcattttcgtcaatgtcatactctcgtgcaatacgttcttcctcttccttatcctgcttcaaaatcagcacataggtacctacaaaagtaataatgccaataagtaacccaaagatgatagtagcaattagtgcagttactaatgaccatactaaacgtttttggtcttcttgtttgatatacgcatcaacttccgaacgtgtttcccccctttataagtcaattagttgcatgttgcttgctgtgttcaacggtacagtaatcttttgtggtggtactgctccgctttctagtagttctgattggtaacgataatatgagcaataacctaatatatccttagttgatacaggctcaatagaatacgcatgtataggttccaaactgttatagtagtcagttataagactagacaataactcccaatctaatgttctagggttgagtgacctagtaaactctgcaaagtggtagcctaaatatctaaccccttcgggcaatttgataagcacatgtattcggtatgcttgtatcatattatccctccttaactctcaaatcagggtgcacccatgtaggtgtgtcagctactttaacaaatttaccattcttgatagtaacatacccacttgatactgcatctgatagcttctgactgaggttgtttgtgctatcagggtcgctagctaaagtaactccttctgctaacattttacccccaaacactctaacatactccataaagctaccgtgatatgtctgcttagactcttcatcaggctttgtaggtgtgtcaggcaatactgcccaaccacctttcaaaccattatacatacgctgtaatttactattcttcattagcggtaactccttcaaaaccatttgattctaagtgcaatccctcgaatcctgttggtgttcggtagtacattttccataagtctgcacgtttaacttgctcatcatttcggtagtcatcttcttggaatccatcatcatccatccagtcaaaccactcttgttctgtctcgtcatactcttcaagaccaaaagcgttagaagatacaatactttcatctagggtaagctgataattagctaacgcatcaataactgcaataccttcagcagggttctgtacagaaatgtaatgaacctctcctgaacctaagttaacatagttgtaaacacgatactgtttcataatttatttccccttcctttactataaatctagtataccttagttattcttaaaagtcaacacttaattagaaataaccttaaagatactcctaataaacttgtcagtgcttctgcttgttcttccccaatagaagtttctttgtggataaacttgtaataggtgtttgccgatatgcccaagatattgattatatctgcactcagtaaccccgcctcttttattctagctccgaaggcatctatgcctccttttaatcggtactgctgttcataactgtatttattagggtagtcaaccattaatttttttaacatatgttcagaaaaccctgtttccttgactgcggtgaccatattgcgataatataccccatcaacaattactcgttttgagttgttcctaattttttttataggtatttttacctttaagttaatggataagaaaagtttctctaacgcagtacgactttcaggggttaaggttgtttgcttagccatcactctagcgagggttgaccttgatataccaataatattagcaatatcatctaaagtaacacctaaaccttcctttaactgaagtattagtgatggtagcttatttacatcagctcgaattacttgcttagcttgactcactataaatccccccctttggtttcaaaagttttatcaggcatatcatcttgtatcttataacctaaagttctaaggtaatcaccaaccgcagaggggctaactttatcagatttaactctgcctttattgacaaatctcacacacatagctaaagttattcgtactgcttttgcgagtaagttgttgagtctttccttgtcttccgtagttaagcctttgggtttaatatctttttttacaacagaagaggttccttgacttttttcaacctctgatttcttatcagggtgtatataggaagttattgtgttattaaggctaactacaacatctttaaaccctgtagcttcaatatacaaaacattacctacattagaagctgtaaatttttcaactgtattttctgttttaggcatatctctcatagtatttttctcctctatatgtttatttgtttctaaactatcaatccaatcatgaaactcacttaatgttttacgtttttttcgtttctttggagttcgcaactttttgctagttatggtagatacattagtttctttaggtttttgttgtactttcttttgttttctttttgtagtagtaaacttgtatggttctattaacatagctacacttacacctaaagcattagcaatattagccactttatccgcaggcaaagaatattgatttctttcaaacaaactaagtaatgtactagacacgttagattcttttgaaagttcttctaaggtaactccttgcttgtctctataatacctttgtttatttcctgtaacgtacactatatcactgtctgacatatgagaagcctccttaaatttcatagtatttatctactaatgaatacttagcaaccatacgattcattaatacatcttttttcttgccaactactttaacaacctttgccttcacaagttctgtcaatcgaggttgtaccatgttacggtcatttgtgataagcttaccttcatcatacaatgcttgtgcaagctctctagccgtgtaatacttacctgactctttaaatttctgaacaattgtttgttggcgctcccctaagttagcaataacctctcggtatgaagacaaccgagtttcctttacaatatgggctttatgctcttgttcttcttctgaatttacaactgtatagttgaatgagttcacccgatggtcataccaagcttccatttcagatttctcaccaaaagtaatagtttgcttcaatttaatcgttcttgagatagtctcattatcgaaatcaaaatataaaatatagatagggaacggtttaatataagcttctgctagcaaaataatagcatccatgactttttctaagttaacatagttgttttccatatctgttttctctaatgtatggtatagtttttctaagtcaccttcaacgtaaataccgcctaggttatacctatcgggtgaaggtgtgccttgaacttcttgacaaccttcttggattttagatactaactcccctaaatagccataatcttcaatgtaacctgtccaaggtaagttcatacccccattgttataaaagtcataatagattttgttgcctgcaattaacatgttcatgatagggctctctgtgtagccccaatctaccccattcttatccattagttcccgatattctttttgatatttaccttcaccagtccaatatgttttcatcatttttcctccttagtaagtgtttttaatatatgtgagacagaatctctttgtacttgactttctgaatacttaggtactataataggtatttgctttttgtttcggtatcttctatttctaagttttggaaacctcatattagttgtacttattctaatgtttgtagtcatctttctattcaaacgaataacccccttatagcccgtaagattctgctaagcctgtccagtcaatgcctaaccaatcaccaagttcggttgggtttgtactgtcagctacttggtcaactatgtcatcaagttccatatacaataagatttcatcatcagtcattccgtcaaagtacttttcatcttcttctgtaccgtaatcttctaaccaagatttaaaaagttttagcttttttctatcgtcaaattgcaactcatattttacatactctaaaactgaacctcggtgctcactgcttgttaaaattgcttctaatgtgttcatatttaacatccccttcttgtttataaacctagtatatagcaaggggctgagaaagtcaaccccttttattaacttttttaaatttttctagaccttcatgttttctagcatctcaactcgttctttagcttccttcagccattgctccttaatgctaattgctagctcttttaaaggtttacgctccatacatacgtagtagcaatcattgaaatatgaaggctgtgctttgtacgtagtatgcaactttctgttactaccgctaactttaatgagctttaactcacctttttctttattatgatacaaattatacatagttaacgtcctccatcaatttaataagtgttccaattgtatagcccaacggtgcttctgttagaaagataatttctctgtcagctacttggtaagggtactcttcaatgtcaattactcttttagggtcgtagtaataaaattcttgagggtcatcctccacaacagtgtctaataggactagcatgtcgtctaagctgtcttgttgcttagctagggtaaatacctcctcattagttaaaacggcactataagcctctaagataggttttaactgattgactattgctaggtactctgtaagttggggtagccgtactaccacactcaggtcttttaactcagcttgcaatccttttacgatttcagcatacgcatagacattattctcattgagggtatctctcaagccccttaattgttttaagtgggagtttaacttctcctgaatagtttccatcatattcttttcgtcctctctctttgttatactcaattccaaccataagttctttcttagcagtataaatgtgtttcttaccttctttcatacaactagcacaacggtaccttcctgttgtcctatttgcattctctttaccacaaacagggcaaatagctaagtagcctgtagtcaaagtggcaggaatgatacttttgtatacggaaccctcattagtggctccactagcccctgtccctgtaatgaacaagtctttctcgaatgtgtcatacccgtctgaatgtggtaaccttaaatgatatagcgcataatggatagcttcatgtcgtagagtactctcaattgctttgtaagcaccttcctcatcaggtgtacctgttagtaacattgcgcctttgagcatcctagagctcatctcaatgtgcggtgggcacgctcttttatagtaggtaacaaaccaagcgtgtgtggtagtcaatctgttgttgatagtcacatgaatacgtggcatcttgccatacgtgacacttaagaactcattaacgtatctctccatctgattaacccaccacttgtacatatctttaggaaaagaaaagctgttctccttaggaaaatgataatatttaatcttacctatctttttagtatcgtaagtagtcataacgcagtccctctctgtctgataatgctattccaataatctcaacaacttgcatcgcatgagcccactcttgcataccttggtagttaggtattgcctgcaagttgtttgcgtgacaaatcagcccatccattagtagttctaactcaaagtctgttttgtattttatagtatctacaatatgttggtacttgttcatcagtacacctcctatttctttggcttaagttcaaaaacaatttccaagtctaacacgttacaaatggcaactaatttatctttttgtgggaatgttgtgcctttttcaaggaatgacacataagtttgtgtcacccctgcacggctagcaagctctgattgagaaatctttttagcttttcgagcttgtttgattgcctctcccatattaattactaatgtttccattcatttcctccatctcttgctttacagcactgtattttttaccaattaattttgtttggtctaagttcttaacaataattttacgttgaggtgtattttctctagaacgtagtaggtatgcacgattgtcacttgttgttctaaatcttagtttgaagtccttacttgtattcaacccttggatttgagatttaaactgccctgctgtgctctttagtctacggttagcttctactacaggaatatctttatgtggaatattcgtaacagcatttgaaccttgattgtatacgttagttacttcctgaatgtccatacctaagctaaacagtaaatctttacctagtcgtcttgcgtgtacagcatcttgcaattgtgcaaacagtcgttgttggtcagctacagttaaattttcacctaattcaatcatgtgtaaagtatctcggtagtaacgctcattatctgataggaacttagcagtgttaactacttgtgttttttgtacatcaacttctacaataatttgattaacaatatcttgcaattgtgtgttaagtttttcaattttcttttgtgttctttctgccttattaaccattttttgagtctctttagtaattttagtcatgtgattcttcctccaataataattttatttatttgatttatttaatagtaccacgtatcttttttgttgtcaacacttattttcgatttggtcgaaaatcttgtaatacgtgcactacatagccacggtcaaccaacatccgacatactaagtctactttccattccaatccttctacttccaactctttacaaatgccaattaacatttctgtttgttcctcttgtgtcaaaaactctcctgtgttactgttgtacatacgagttagcaaccctagctctttagatgagtcgatagcttccaatgcccacattgtttcaattttatctgctgtgtgttcaatgaatggtcgttcaactccacatttggcacaatacatatgtttgatatgtcctacttcacgtcctcgcatagatggtcgaaagattggtgctacatcccgacatgccccacatactaagtttgatttacctttacctgctcgttttttcataattaattccctccgttgtcttcttgatatatttataataccacgtagctttttatttgtcaacactttttattaatttttttaaattgtttttagtggtgagctacttgatatatttataataccaccccacctacgatatgtcaacagtaaaacaaaaaaaagtagctaattaatctagctacttcgaatattccttatatttcattttgaaccagtctatcacactgattatcattgctattactcctaatgcaagaaacaaacctacacctacaagaatagttgtaccaacccaagagatagttactgcccaatagtatataaaacccataactattatagcacctatataaaggacagcatagagtagaaactccccaactacctttaaggtctcctttagtagataccaaccaacaccttttttatttgttcgggtattcttcattcgacagcatcctttccagtctgaaattgacttctcgttcaacctgacggtctacatttattgtatagcctaatacgaatccgattatcatacccccgatgactaataacgtcactaggggtacactctttttattcatcttcatctacttaatcgtgttcaatgtacgagaaggcatacgtcttggcacattataagtatctaggatatagaacaacccattcttagtaatgttaaaggctagataaatgtctttgagagtcatcttcttgtctgtataggctcgaatcaactgattgcgtttgttgtcatctgataaatactcagctacttggactcctgcgagccctgtagagcctcctgtcgttctgtacggcactttatgcttatttagaatagagtacaaacgacctgcactgaaatcatatttttctagaatatcgtgagtagacattccattcttataatcttcaataactttctgttcagtaaactctagaatcgactgctcttttgtttcgacctcatccgcagactcttcatcctctacaataatttcatcgtcaataacaagggaggtaaaatcgttacctgtgcgcttacctgtagtgtgtacgattaccccgacttcaccattgttaactgttacagaaccgtttgctaagctttcttgtggtttcgttgatttaccttttttagagatattctcaacaaagtctttaaaggtcgcttgttctgtttcggtaaaacctaagttgtccatcttaacagatagctcctctaaagattcaattagtgtatctaacttttcaaccacgataccaaaacctgagtctactaacacttctaaagtttctttatcaacagcactgcctacgcctacagtttcgaccacataaccgctagaagctaacgctttaggtttgttcatatcattacctgcaaggtcagtaactgcgaagaaaccttcttccatctcaaacatacgagattcttccagttcatatccgtaagcttcaatcccacgaatcaaatgaggatatttactgaagtcctcagaaggaatttcacgcttcactttgtgacctgcaatagattcaacagtcatactagcttttttctcttcgtaacccgtgccaccatactgtttgttccaagcttcctgtgattttttgatattctcttctgtaggaatatccttaagctcaggggttttatctaggacagagtttgccatgtctacaaaggaactaacctctgctcgttttacctcacctttatcctctacaactttctttacattatcagtctcttcaatcattgtggtacctccttaaatttataccctaagtataacaaaaaggtctgaacttgtcaagacctttttctctttttattataatttcgttaagttatcttcttcgatgttgtattcaacccgactaagattatagtagaacttacgtgttcctaataactcatcctcatctacaaagatagctttaacaatagcagtatctacttctgcgttgcctgctccatcctcatagaagtatcttacagtgtcccctactttaaatttagggttgtacagcctataatcatcggtgaactctaatacatcccgtgtaacaaagaagttaaatggaatatcgtacaccacccaataaggtttaaagtattcactcttttcatctcgacctacatcataagatatttgagttacaggtactgctcgggggtctaagcgtactagaatatcccctttattcgtagactctactccacgaaccactaatgtactccccgccattagtttatctaatgtttcttgtaatgaaagctttttatagcttaattgtttccataccatctgctatcctcctagcttagtagtgttttttagagcctcgtttaatctacggtcttcttctgtaaggtctagattgttgtaaaactcttcctctacttggtcaatgtattcaattacttcctcatgtttatcctcaggaatatatttaaacaggacttccgttaatgagttttgtaaggctaaatttctaaggtttaactctttaagccctgctacgctcattccttgtaggctgtcacctgtaatctttttcttaagctcaatagccttcatagctatttgagggtctactacggacacatactgcataccattaaaccctttttggataatgtcatcaagtaactcaatatcactatataaagtatcttgagcagacatttctttttcatgcttatcgtgtctagtctctacagggcttttaacttccttgcctgcgatactaactactttagatttaacacgcccatctagaacttcttctaaaggtattccttttttaatagcttcctcacgtttgtctttgtaccttgataaggttgctttacttatctcgaactcgtattcagcacataattccataatctcgtcatatgtcttattagtatccaaagcctcgttaaccttagatgacagcaacttattattatggagttgtaacaaaacagaacctttgctagcctgtttttttcttgttggtttcttcttatcagtcatttcagatgtcaaactccttttgctctattagtatgtgaaatcaaggtaaaagcccaagcaattaccatttcacttataatatagcacgagttttcacattgtttcatgttgccttaaaatcctagaaaagtcctactaagtagtgaaacttttctagggtacattaaggtgtgtaacatgaaacatttgtaggtcattattaataagatgaaataattcgtttcaactaccccataaaaccttactaagttgtgaccttttttgcatctaaaacttcgtttgtttacctaaagaacggatgattttagtaatatcatgcgtatccttttgccctgcatctaatggcggaaatccaaaaggaaaaggtaagtccgcaggtgatggagtccaatcagtagctttctccacctctttagacccatctgtagggtacataactgaaggtgcagagtgcattgaaattttagtgctgtaagggttagcatcgtacacccctaagtctaaaacatacttagaaaatgcagtgagtgtaacatctgtaatgtcaaccaagctgatttcagggtatttttgcgccaaggtcttaacatagttccctaagctagacaagtgcgttactagttggtctactaccttaaaatcagcaatagtgttactactgttataagagaccaactctagagggtcaactgttttaatgcttgattttaacaaactgaactttttattaacctctccgtacaatttacctaaaggattgacctgcttaggcactccactcttagtgttgatacctgcatgtttgtataagtctttatacgagtcaaagtacttaattcggaaccctttaccatctcgagcctgactctcatgtaagtcagattcaggagagaagtaaggtgtcatgtcatccaaacttggtaaaaacgctacattaccttcccgtaactttttacgagtatctctagtttctacaggaaatgccataccataatcagttgtgataactaagttacctgatttccctcggtatactaagtaccgaccacgttctttaaataagcccttaaagacgtgggggcttactactgttctttgcactacaattgctctaatcattttgttttgctcccttcctcaatactaataaagtgttttaatgttgctaagttgtctacatatacctcagtgcctcgggttgccatactaacattcttcaatgctgtatctacagaatcatagtagtgcagtaagtacacgttaccttcgatactatctcgcatgtcctgcatatctttgttgtattttattttagcactattaataatgtcattttctgacatagactctactgctactaaaccctttttaagaggctcctcctgagacttgcttgcttctgtgtatttcttagctacatgtttatctaaacggtctttagacacctgagcaactgtagaacataataaccaaaaggcaattaaaattagcactgcttgaaaattcgtaatcatttattttcctcctttaatctttcttcctctagtttaacatagaactcatctattgtcaataccccttttttaaaattacaatctttgcaggcacaacctagattactaatatggtcagtacctcctctagctacaggtattagatggtcacagctacagtcacctgagcttacaggcaaccgcataccgtgtcgattcgtagatgctacatctttaccacaatagatacaagtgaagttgtctctcaatgcaactcggtgtgggagcgcaggtagtgtacgtctctccgttacacgccatgaatagtcgtcagcacactctttagaacaaaaattatgtttattaccctctaaaggttttccacaccacttacatacagatttatctgttctaaaatcagaagagtatcggggtacaggaaccccgaacgcattgtagtactctagcaagcttaaccattttctagtatactcatcctcttctgcattgtatcgtagctgactaccaatatttgtagtcttagccataatttctcccttcattatctaccccaaacgttgttacctagccctactttctcagcaaaggcatcaataaactgcttgtggttttcatctacagcttgattaaaccgttgttctgcttgaacaatagtcccattcctaatctcaatgttaatcaatgctttattaggcttggcaatatctcgcataaagatgacttgtttagctcctgaaaccactgaatgcgcatagctagctacacagttacccatgtctgaaccttctgacaggaagtcgtcaactgttcgaggtacaatgattttgtattttgcccctctaatcttaacactttcgtagtcagatattttagctgtttggctctctaacttggctacaaagtctgagtctctagtcagatttacgttagctacagcaatgtcatgagcggtcttaagataacgtgggtacttgtcataggttgttgagtatctagaaatcatgtcaagataatcacgatacgtagtattccccgtatcagagaaagcatgagacgaataacttttagtacctcgaaggttgaacccttggtcaagagggcattgatagtaaatatagccaacaactctcttaaggtcaaatccccgttttaaatggattgcaatagcggaagtatcttccttcttccatattaaccaaccaccctcaccatttacaactcgggctgtgtggtttactccatactctttgtttagagatttagtaatatccataacctgcataaataacttgtaaccaatatcgtagtctttaatgttgttcgaaatagtttctttagccttgttactttgtacctgcacttctttatcatatagtttttggtagtagtctttcaccttaggactcatagccttaatattgtcagtcatgatacggctattttcttctcggtattcacgtagcatagaatagtaatcagagctgtctgttctccattctaaccgtctacgaacatctctatctatatcttcccaatcaaaagctttcacctcagggagtcggctttctaaccaatagtcaaagctatccatgtggaaatactctgaaaactctccacgtttcacattctctacatactctttataggtcttagcttctctagaaaaactttgtagttgttttgcatcaagctccccacgcaatgccattttccataatggttttggtaaccccatcatcatacgtgcactcgtttggctagtatctagataattacgctcattgtaactaaagtctgacatatattctttgactgtagttctaggtagccctgacttgtaaagaacctcaatccaagaatattgaagtagtcgctctaagaacctaccaatgtaggaagccacttctttattcatggtagccattgtcgtgtacatgtcatagtaaaacatcggcgttgctcttggtgacaaaacaaacaagatatttttaatcttaagtgcgtaagaaacttctgagaacgcttcttggatatttttgtaactacgttttagttctttgaagtttctagtatatttgaacactcggtttacaatactgtattcaatataagagatagtataatcagttacccctacgtgaggaactacaatataaattttaaaccctgtattgtctttttcatcaatgtaaaaagccccccaagtttcatcccaattctcaggcttttcagtcaagttcttcatactgaacgtggcacctgcactaatggtattccctcttctacttgtcacaatctcgtcttcttcgtagtatcgaccaaagtaatgatactgcaaatcattcacttcgtcacctacacgtttgcatgggaagtatagtcgtggaatgtctgactcctctaattgtttgacagctaaattaacagtgtctttcagtgttgcctctgcatgtcctgtaaaatcaaaattcatagctcgtttctcctttgtttttaagttctaattaactatagcacaaataaaaaaagatgtcaacaagaagttcacatctttttacaagtttatcctagagataatctaagtaccccatcagatacgtagatagacagcaggtacttcccttgagacactttcttaactgtggagtatttaatatcttttttgtttaagataatggttcctgtgtctgcaattacatggtaagaattttctgcctcagcaatctgcatattagcgtttaaaggatatacaaccgcagtaatagaattgtactgaggtttgaacatcgcactacctaataacagtcctgtgaggttcggctccatgataatatcaagcaatttttttgtatctcgtttatcaagtttaggctttggagctccatttttattcaatactagcaaagtactaaataagttttcgttgtcatagaccttaggcttaaacaatagcgttagatgttgcttaatatcccctgtggtagcctctagagacgattcaactacgaactggtataatacctcccctgcgagcttagtctccatgaaggacacgttagccccctctaaatgcaattccatgttatagtcttgaatatttgaaaacatagagttacccataagcaaatctacatctagtggagtggagaaaacaggttccatgactttaacatcatcaatgaaagcacccccaccaatcaaagcaaagctttcctccaatgtttttaacatagatacttggctaggtaatggtttcaatgttatcgtagctgtcatcccatctccttggaatatcacattgtttaatgcggtatgacataagacttcctcttctaaaatatctgtggagtaagctaaccccaccaaagataactcgtcatttctgaatacatgaccacctccgctagaagctttaactgctttagctaggtagtttaacgagctttgtttatgtttcattgttaacatacttacactcccctataaagttcttttttgtgttggttttctgttacggttactttgacgtttattagccctagctttagcaagactactagagtttgctcttttagttcctccgcctgtgttttttgagcgtaaaaacttcttctgataaataaaaatgagctcgtttaagttaccgtatctccgtacactgattgaaatttttccgataatagctttacctctatgcacatagtacacagaatcaaggctagtttcagttaagttttctttcttaggtgtcaatctaataaaatcttggtgacttcctatatgcttggatacaagttctaaagcatacttctcttttaaagctatatccttttcagatacacctcgatattttttattaaattctacataataataccctttaggggagtttacttgagatttgtatgcttgactaccatcacccataccaagtaaattccccataaggttacttatgtcgccatatttacgtccgctacttaccatttacccgaaccatcccatagtgttcagcatcagctaagctaacaaatgcttcaaaggtgcctgactttgtatgcaagcacttacctcttttggggtcatccacaataataaatactgcctcagtaatcgaaggaagtgttattgtgtccccaattttaacctcagcacctgttaatacatgtttcatttcattcattgtgtttcccccttttatgactttttagtaataataaacccatctatgttttctagctctaagacccaacccgagcctttaactttgtccttgctatattcatccaccttagcaggctctactgttagactctcactatcatacccttgctctgatagccactctaaatgtaaatctaggtcatgagctttaatgcacctaccctctttaagagagtaagtttgtctatctgctcctgtaggaactatttgaactacatatgccattatattccctcctttgggttaaaatgctctatcttaattgacttttcagggtgatttctgttgttaatcattacgtcacagaataccttgttagcctcttcttgacctaaccttgaaataagagcattaataagcacaggtttacgtgcattctgactgactaacggttgattgactactccacttaaaccaccacttcggttactataactagccccttgaatttcaggatgtgcttcctctattctaggggtaatatgtttaaatgtccctaatattgtagataagtccttacgccacaatatattaagtgtgtggtatacgtccttaacaggagacttagttgcttctttataaatacctacccaaggtgttacccctatttgtatgtaagcaataatgcctacatgattatagttcttggcttttagtattttttctactttaccaacatgagaatcatgacacataacgtatacgtagtcacaaactttactatagtccgataactgtttatttagtcgttgtgtgctatctcgttctgtcttaatctcaatgccaataacacccttgttctgtgtgcatatcatacaatccataatagttttctgttgcataatagccttctcaaagattagagcactgtccccaatatccccaaacatgtgctccatttctttgatgagagccactatgtcggcttctctgaacttatcttcggtcataggttaaaccacacatccttaattgctactacatctgcaatcaagtctcgtgtaggcactcttgtatctaaccattctattgaatctaatgatacaaacacatttgttggtttcccttctattacagacccgcttgcagtaaacttatcaggctctctttctaagaaacctaaacaaggttctcctgtaaatgtatccaaaccttctatgataggtgttacaaagagtggcggtttttcctcaatgtagctacgctcttgttttattcccttagtttgagctaaggaacctagtgtagtagactgtctgtaaggtactacggctttcttagattcaaacgcctttacaggagggtctgacttagcttgtactgagtacacaatagcaacatcaaaactgttggggtctattacgtgctcaataaggtaaatagcctgcttgtttgttataacttctcccgtaattggatttgctatcccgtctaagacaggcacatctttgtatagtacacctgtcttaatctttgtaggtaaacttagtattggctccgagaacgaagcttgtaaatccatatccataaattatcactcctatacataaatatagcatagttactctttgttaagcacttgctctctaagatagttagctacttcctgctcttgtttgtctttaatttcttttttatacttacgaaccataataattttaacaacccaagcaacagttacactaacgaatcggcttaccataaccgctactgcgtaaatgatagctacgataatgctcaaccataccatatttgtaggtagcaacgcaacgataggggatagtaatagtgccattagccatactaccaaaggagcaatcagaacttcaatacctaaaaatacccatacacttgtaggtaaaggagaacccccttctctaaccataacccgctctttctttaaagaagcgtaaatagctcgaactgcttgagctaccataaatacaaccattactacaataacttctgtacccatctacttatcatcctctctttcaataataacaaatggaaaactagcaaatgctgtactcagagtgggcgttccatgccctactactgtccattctttatcttggtataccattttagacccaatagggaatttatgttttaactcgctaggagctaatacatattcaactgtttctcttgtaatcatttttctacctgctcccaaaccatcgggtatccgattatcccaatctcttctacattagtatatgcaaatacttcctgtagaggttttactacatactctcctcgacatttaatcttagtttttgggtcacgacctaacgttgtataatcatcaatggtcaagttctccactgcaaagtcagtactagtcataaggtattctgcaacaagaagcattgacctgataacaatattatctacttctttactgaccttcacatcaacatacgtagtttctgctgattttaaatccacacggacagtcactaaatcatagttattcatttcttctgccaactttttatctaaactgggcatagcatccatacaactaatacatataggcatatcattgtacccatcgtaagattgtgccattgttacattcagctctctaccacaacgactacactcataagactcattcatagagtaatcagggttaaaaaacttaactgtgatagctaagcccttcatattctctgagatagtatacttattcaggaatacttgtaaagctaactggctctcttttggtaaattgtagtaactaatatattcatagtagggttgctccccaatacctaatctacaaatagtcccatcatctgaattgaggacatagataactcccccactcataaatacctcttttactggtactattttaccaatagattgagtgaatgctcgtaaagatgctttatctttaatctgctttttcattcagtgtctcctttctaaaataaaaacctctaatatactaatagtatagcacactagaggttagttgtcaacacccttataaaataatcgggttaaacattggtcggtctttcagtttatctaagactaagataaattgtgacggtgatgttgtaggtaagttgttttctgagctatagttgtttgctcccattggagaacctacatagatatggaatctagagtagtcttcctgaatgattcgagtagtgtggatatgacccataattaagtagtcaatatcatctctacgaatgtgtttacgaatcttaacgtcctctcgtttagcttccatgtccccatgaactactttaattgtttttcctgcaacctcatcaacaaagctgtacacatcttctcggttgtcaatcaaagtgatattgctaggtaatgtacctaattctttaaagaagaatagcatatctaacgttaagtaggctacgttatcattaaacactttatcatttttatttccttggaatcggtcgtggttacccccaacaataccaaaggttacttgttgcacttcactagaaagatatactagtacatcatatattaaccgaatacctttagcaatctgttctgtagcaggaaactcagcttcaaacgcttggttgacattacgcatattaatatgctcaatcaagtccccaataaagtatgcgtggatatgattgataccctgctcatgagctgtattaacagcctctacagcaagctcagacactctattggttaacttgttaaagtcataccctcctgtatcagggttcgttacaagagctcctacgtgccaatctgatagtcctaggactaattctttttctgagtggttgcctgttctcttagggataatatattgtgggttagcaatagcattttttgtaaattcatctgctagataggacttcaacccattaaataatcgttcaacatgtgcacctgttctttgtacttcccgaaactcacgattattagctaaaacttcctcgttagctaaaatgtaaggagctactgtttgttggattcctttttcttcaataggtttaacaggttcgtcctcgtcaaaagaagtatacttctctaagtcttctacatcaacttgcccctcaattgcaagactgtgccactctttaagtgcagggtctgcatgtatatgctcaagcaaagcaacaatgctgtctttacttcgtttgtctaaacccaatgtggtagctatcttgttgaatgtacctacctgaattttgttgtagtttctaagaatgtatcctgtaatgatactttccataacgctaatatcttgtagctcgtcacgttcatatttatagtttttgtctgtcaaatttgtacactcctaatgtttataatatttgcctcaatatcattataccacattttagtggttatggtaaacttgatagcatatttatgacaacctcagccgtatgcttacttgcattgccaaggaatactgtgcctacgttttctttcccatttccgttgttgagatactttgctacttctcctgcatgagctcctttggtacgaactctgaacatatcgtctcctttagtcttatctccgactaagacaactattttttgcattcctgctttaccatattgattaattaaccaatgggctatctcattaggatactcctctgcatataaaatcgcaaccaaatagttacctgctaactttatatcagctagctgtaacctgcgtttcatatagttctctcttttaacattaagagctttgaactcagtcctatgggattctagcaactccgccaaagtcttttccccaacaatactataagtgaactctccataaaaattaagaaagtcattgaaagttatcgggtctactgttcgtttgatagagaaatcatatctatggtaatcatccccaaggtctacatacgaacgcactcggtctatatcttgactctttaatggaacaactttactgataaagtcatcagactgtccttgcatcaagaaatcaagcattaccgctacagggcttttcacttcatccacgatagagtttacatattgaaactccatacggtcaccaaagctacatatgtgcaacaccagtgtgaaggggttagctacattctctaaagctttcttagtcataacttcttgattaggcttatatggaaaccctaagataattacagcttccgcctcagggtcatatttaaagtcttgacctgacaatgtatacgagttgtcaatcactgtgtgtatttctttatctgagaacaatgattgaagcacatacgaagctaggtacccctgactattacctcgtgtaataagttgaatcatacagtacctcctattttttatatttttattactcttagagtataccacctattatagtgtttgtcaataaaaaaagacaactatttaagttgtcttcttccttgattaggattcagttactgtaactggtacagttgtattatctgtaagtgtagccgtaccaccagttactttaccgtcagttgttgtgaatgctattgatttaacagaagcacctttagctcctgcatcacctttagctcctgcggtaccagtagcccctgcatcacctttttctcctttagcgcctgttgcaccagtgtcacctttatcgcccttgtcgcccttgtcacctttagctccaacagcaccagtgtcacccttttctcctttagcaccatcggctcctctaaagtcgattaactctttaaagtcatcaccgttaggtttctttcctgtagaaaacttagtgtatagttcttcttgtgttgccatttgttatcactccttgttttattgtatagtatactcccctatagagaagtctccgatacccccgacatcaacgggggagtcatcagggtgtaactacagttggttctgttactacaaagatattataaacaccgaaacggaatctatctttgataaacgccaagaatgcttgcaatacttgtttttcaagaacctctgctgaagtaacttcctctttcttcaagattgggaaagtataactatctctatttgtacctacaacgtagaacacaaagtcatcttctgttatgatgataggtgcatcaattttctcaaacgcatctagctctttgttatagttgctaggagtaactttgtagtcttctccttctttttctactaaataccagtagtttccttggtgagtttctgtgaatccatctctttcagtggttgcacataagtaaactccatctaactcaatagggtctgaaccttcaatcaagtcaataaattttttaactgttgccatgttgctcaatcctcactttcttattgattattctctttttgtttttctttaaactcttgtcttgtaccgaccttagctatacctttttcttctttttttacaccgtaatgtgtaacagggttgtttttataccaactccaaatactagtacctatagttagcacaagtgtaattcccatattaacttgctcatctgtgaaaggaaatggttcccatccgaactggctagttaaaagtaaacttacccatgatatagtcatagctactagccgaacaatagccattgttttcgggtctgttcctgtgttgttcatatctttttgttacctcctatcctttttctaattctaatatagcactcgaaacaaaaaaagctaggctatcttagataacctagcttatgtgctactagttcttttatgtcagcaattgtttcttgtacttgcttcttagatacatcatatttagccgtattatcagctacaagctgttttaccgtccactcacctgttaccattaccgatagtatatcttgctccatagggcttaatgtaacgccctcagtgaggctgtctactaactcttggaaaccaacagtagcatatggtgagacactatcatccaacatgttttcaacttcaccttcagttgcacctaaaggttcacgttttctagtacgtatagttcctgagttgaaggttccttttactctagccgtaagttttgtcttaatgtaataagggaaatcaacttctccattaatttcgtactccttacatagcttaacaaactcttcatcaatatagctacgcaattcacttctagtaacactgtcgctatacattgaactgtactgactatatattttattcctcaggttctcatatctaatgaacaaagtgtctacatcacgaggaaacacacctgttgagctacccacttctgttacgaatctgtttcctgttctgattaactcttgttctttatctatatccctagacaaaagggttatctcctcggaaaaacaattttgtctttgctttggttctgtctacttcgtgggtagagacataaacttctgcgtaactaatcgtgtgaggtatccgaatgatttcattgtagtagcgttgttctttataacccttacaccatctatcccctacatagtcaatcactaatctaacagagttcatattattaatctctgaactttcaatgatgacttctgttcctgtgtccattgcattttgaaacatttgtcgaatttctccgaatgaggtaggtgctttacgagaattagtagcagattctcgtctgctactataataattcatcgcatctactacttgacttagtggttgttttctactcatgttttcctccttatgtcgttgttattcagcgtttactacgggttgtgcttctgatttcttcttagcctcgtaacgagcacgtaaacctgtgaaatcagggtttaactcaatgttgatagcttcattgtctaatggtgcataccaattagggaaagttatcatatacatacgctgaacaagctcagaacgcacagcttgaccttcaggggattctaggaacgcaatccagtcgtttttatacatagatagttgctcaccgttttcagttacatattggtagtaagctccactacgagtcatcaatccatacttagacggtttacttgctagctcaaaatagttttcagctaagttgattccgtggtcagtattaaggataaaagtttcttttctgttaggggtagatactttagattttttaatcttaatacctgcctcaaaactactgttaacattttcagttttaccgaaagcattaatgtgaggttctgcaatagctgaacctttggtgatttctaaacgtaaagttgcccaatgtttaaaagcattacctcccgcactttcaatagaaggtgtgtaacccccaataacatcccgagcttggttaattgctaagaatagtgttgatgagttggtaatctcttgaccaactaaagtggtgaacttagtgattgctttagattgtaaacccatctgcttctcttccataccaccctctaattgtgctctaggaggcgtagaagccactgagtcccagatgatgattaatcgtctacctgacttcgcagaagcttgaattacttcaataactttgctacctacgtcttctacagtaaacttgccatcagttggttttggcttagttcctgctttgggttcatcaggtctaatatgatagaggtttttaacagggtctacaccacattcgattaaccgttgtgcttcagtagtaccctctacgtctacccatacaacatctacattcattcgttgtgccatacctgacataagaattgcaatagtagatttaccacttgagtttttaccatacatttctgccatacgtccaaaaggtagcccgccacctaggataaagtcaatattaggtaaccctgttgggataatgtctaaaattttagcttctcttgtatcagagaatttagttagccctaagttttctgttgataagtctacagttgctcctgtagcattcttttcactttgtttttgtcttgccattctgaatatctctcctaataaaagtattcagtcccctatttcagtttactagtaaacgtaaattacaggggactgttgtcccctgctttacttacccttggcttccttgcatagaacttaacaaagagttaatatcaggaattgcacttggttgtggtggtacactctcagcaccttgctctacttgttgagcaggttgttgtgcaggtgcttgattctgtacaggttgttgcatattttgttgctcattagcaggagctacatctgctaccgcttgttgaggtgtatattgttgctgaacgggagcttgttgttggaatccttgttgtgcaggctgttgttgaacaggtgcttgttgttggaaaccttgctgtgcgggttgttggaacccttgttgagcaggttgtccaaagtttggttgttgtccaaaaccttgttgttgagtaggttgttggaacccttgttgttgaacaggttgaccaaagtttggttgttgtccaaagtttggttgttgtccaaaactaggttgttgtccgaagtttggttgttgcccaaaagtgttttgtgcttgtggagctccgccaccgctacgagcgttaaaccatccaataaagttggttacgaagtctgcactatgttgctctgttggttgagcttgtagcgctaagtcttcgcataaagcttgccatccttgaggtaaagcccctaattgaactgattgcataacatttacatcataagacattttaccactgtttttagcaggttttacaatctgtaaagcataagcgttactttctgaaataaagctgtattgagcaatttcaggaggaacttcttgtccttgaggtggtgcaaatgcagggtcttgcaatttagctccgatttctgcaaaggcagattgaggcaactctactacgtgaacaactaattcttttgttacagggtcagtctcatattggaaagagcctgtctgagggtctaattgtacttgaaccgcattaactaagaaacgagcagatggtttttgttgtgctccgtttttactgaatgggtttggcaataaacctctagcagaccaatcattaatagcgttctctaaaggagagttgatgtcaggtgctagagacatttgcattgaagcaggaacctctttacccgcatccgtaaatgttttcaggaaaatactacggaaaccttcagcaaattgtttatcaggtgccataggcggtaaaatacgaagcatcaatgttgtggtatttttgtcaaaatacaatttagggtgcttcaattgcttgtcgggacgattactgttatcaaagtcccctgtttttactgagcctagttgttgttgtaattgttgttggaagttcatattgtttaatctctcctattctaatagttgtttggtgcactgcctgtaaagttcataccacgttcatagtcttttaccctacgcaactcagcaccatactgaattaacatatcttttctttgttcaaatgctttaaccacatacgttagttgcccaacaaggtaggtataagtatttacaccttctaacagtttaacataagactcatcttgtagaatctgtgcgcttacctgttcttttgtaggtttattaactcctgtatccactaaagctaaccttgcctgttcataaatacttgccctgtatgtttctgcttttaattccgcagactctttgtacatcttcactttttccaagatagatgcccaataaacatacttagatgattgctctgagaactcttttactacgttaaactcattaaccctgagctcctcagttaaatcgtatgtgtgactgtctccattgccatctttaatagtaatcttatcaaagtcaaacattcctacattaatctccaaaactactcaccgtcctctcgaacatcagcaattttagtgataatcaaaaccttacctgtagtgcctttaactacttgtacagcaaaattctcaacactgtacttagcttcaagctccttaaagatggattttacttcatcctcggtaggttctctctgcatgaccatctcaattaaaggcttgtcgataaaggttaccccaccaacatcactgccatcaatcaaatcagtcgcataagaaataaatttttctttgtctcccatgtcgcccctccttatcttagtacttactaagtatatcacatattctagtgtttgtctaccctaaattacattttttttgtatctctttttaatttaataatgtaacttgaaattttttgttgagtttctgttggaatgagtgctgtatcgtaacctgcattcttatatctctcaacggtagacgtaataattagctccttgtcataggatgggtacactgagttgtttggtagcgctaatgatagtaagttgtcacctactgtgaccgaaggttcctcactcttagacctagaagcaatcaggctatcaatgtatgataccatagagttaattgcctcaggaatttgtttttctaattccttaacaatattatctctattctcaatagctttgctattagataacggttgcttttcaacaggcttctcaggctctacaggtgtctcaggttctgtgggttctacttcctcagggtcttttacctcgtcatcaatagtcaaattttctttttcgtccattatgtcacctatgcaatagatagatagctaggtctgttagcttctactactgcttttcctttctccatatcttcttttgaaatcagaccattatcttggtaatcagcaaaagtttttttatctttataatacttaacgtaccctttaactgatttgaactctgctaactcttcagggttataatcaaccatgtcgttatagttttcaccaatctccacgtctgattctattgggtaccgtttcattgtaccatcaatccaatcaactgtcaagaagtctacaggtaaattttccataatcattttagcagttttagctacaatctcaatctcctcaggtggagagtcgattacaatactatcatgtacagtaagaactacttttgacttcatccctgcttgtgttaaccattcatcaataaagactactgataggttggttaaaaatgcccctgtaccttgaataattgtgtttacggattgacgtaatgcctcatttcgaatacgtttatctttagagtaagctcccataaggttacgtctgaatccttgcatggtttcaacatatccgtgcttaagaacaaaagcatgtgcccattggataaattgttcaatcataggcttacttgatagaaacttctcaaatatctgttcagcttcttctacagtaatatcatttttaggtgcgaaagatgaaggggtttccccatataccaaaccaaaggcaacacctttagctcgtttacgcatatctcctgatacctcactctcaggcacattaaaggcaattgatgctgtgtttgtatgcaagtctttaccatctaagaacgcttgggtcatagtcgtatcttgagctcttaaagctacaacacgcatttctagtgcttggtagtcgagttgcagtagtgcaccatttttaaaactagtagtgaacatccgtttaatcgggtaagagtaatcaaaccgtctagggtcacccactttagaaggtagttgttgctgattggggtttgaacttgatagtcgactagtttctgttcctgttgggttgaaagacccgtgtactcgaccatctttattagaaacatgctctaataatttagtggtgaagttattctttaaagtgttaaccttagagaactctagcaacagtttagcaagggctctatgttcttcgtagtactcaatgataagtcctaagttgtgtttattagacttatagtggttccacttaagctcttgttcagggatacccgcatcccatgcagtatctacaatagattccttatcataaggaagctttatccccaacatatcatacaaaactttcttcttatcatctgaagacgtaggtctgaacttagtcccatttttcttaaaacgggtacgcatattaacaagcgttttatctcgttcttgtggtggcgtattaacaaaatgttcaatactcatttcatacaactcttgattacgttgttcaaactcttgtatgataggtattttacgaatctcttctgttagtctttcagtttccttggtatactcacggtcaatgttacccatgtagtccaagtttgctaaaacacctacactctcgatatgagctaaagctcgtgatagcctaggataaaagtctgtgaataatgaccacatacggtcactttctttcagtttaggctctaaagtatagtaaatacgtctacagcagtccacgtcacctgaagcatacggatgtagcatttcaagaggtatccattcatagttgaagtccccgccatcaatttcgtttactaaaggtttaactgcttgctttttaggttttggtggtttcttctgcttaggaataagagataacttacgaccctctttaatgtattgttctcgtagttctttttctttttcctcaatttcagtaatctcaagctcccaatctttgatagcttgttcatgctcagcaactacacgtagcttttcagcttctaagtgtttttctgcatattgcttcttataagcttctaacgggttatcataaccacccatatctgtcatctcataagctaagtcagataatcgtaaagacaccttagagtcttggctgattgctaaatagtaaccaatcttagtatctctgttctgagtgaaatctgtgaatccttgtgtactcattaagaaccgaatatcatactgaatgttatgacctactttaataatatctttgttttcttggaaatccttaatcatagcatagatttcagctaattcctcaggtttccacgagaactccttatgttcaagaggaatagttaccccttgggagtcatcccaacttagagaaattaccaaaggtttagctcctttaagctcaggtttcaatgtatttgtttccaaatcccatgcaactaaccagtaagggacagttagccctactctcatagttttaaactgattaaatatctcccgtactctttcaatagtagaaacaaactcgtactcagtatcctttgctacatacgcttcagaaccacttttaagaaacttctgtaacacattcatatctgattgaacaaatctttcagtattaggttgtgctgtaatgtattccattgagtaaataggtagtacccatgttggatactcagcaataacattattggcatcatccttcagcttcaaagtaacttcttcaggtcgtcctcgaagcttggtaatagcctgcacacctaaggtatatttacaccctaagttccccattgggataataatatcaggttttaactccataattcgttgagttaatctccgctcaggttcttttcttaaagtttggttaggttctttatacttaataacccgtccagttctagggtctgttttcataacctcaggtatcaaatcatacgtgtagtccacataaatgtcttcttgtttgagtttaatacctcgagcatactttaataatttcttacctaaattagtagacaagaaatctgctcgcataccttgctcatctgacactatgtgcgtatctctaacgtactcttgtaggaatagtactttcacatggctcctccttataatatataggtgcttagacaagtaaatgtggttatagtctaaccctatttctcatgagttaactataccacattcactggtgcttgtcaagctttttcatttaatttttctaaagcattctttagttcaactaaagggacaaacttaatatcttgcttctcgggtacaataaatctttttttatttataccatcccaagccttcttctcttttcttgttgttatatctagtctatacatcttatggtcttttattgaataccctttagcaattaactctgcaactgctaagtctttagattctagtatctcttttaccacttcttttgtatatcctgtatgttctgatatgatgcctgctagctctgctctattaatagttttttgtttagccatcataactcaccctatctttcactctgttagggtttcgtttgtctaaatctctttgtaccattttgtctagtgtttggtagtcatctttggaatcacatacaatgtaaatattcattttccaaatacttaacgaagtctgtatgtgtttaaaatacttgtatttaatcttaggttttacttcgtaaaaatccccaactttatgataatattttttatgtctctcagacatttcattaggtctcagtctaggaaaagataactgtactttatctacatggttctttaacggatgtagcataaacaaaatatcataagggctaatatcaggtatgacaactggtacatcaactataactgaagttgctgaagatgtcaaggctacattatctatttcatcataagtaaaatcctctctagagctaaagacagcttcacttgttacattgtttgctagccctttaatcacatagtaggggactgttgtatctgtgtaatacgttaggcttcctgcatggttcattaacttattaagtagtgtatcattagagtaactttcttgatatactaggtactctttatcatctttaactttcaacctgttggatttaagctctagctcatccatctgcttctcaatatctgtttcatttaacttcgtaaccttcactttactttcaagttcttctctcaacattaggtttatattaaaatacctgtcagtattgtaaacggttagtcgtttctttctcggttttctaacatcattcatggctatcctctttcgtgtataatagttttatctatctctattataccataaaaagcaaaaaacctaacataatagttaggttagttggtctctctttacatcctgaataagctctgctagtttatggcgtaagctgtataagaaccatgaaatatccttctcactaggtttaaagttttgcaaaccacctacatactcagctacaaggtgcagtaactgtgccacagctaattgacggtctttagggtatgtttctgcaatatcatgagcaaaattatagagctcttctgatatgtttctaatgttttgtgctcctatatttttaagatgctttttataagatttaatatccactccgacacctgaaaatgtgtcttcattaactaagtggtatctaacttgaaagtctcttaaatagtacatagctttagacaggtcttccaccatattattttttctaggcgctcgtccaatgtacttaagtgtgtttcctagaaagtagctcagctcagtaggcattacattagtaatatctgcaaggtaatctagtacctctttacctcctgataactggtaatgcttaggtaaacttacagggttaaattcttccatcttatcctcctaaagacttgatttatttattaggtttgcgatatggtcttccatatcctcaggctctactttgagctcttcctcatactcaccgtttctattagtcagcatactctcttcttcccaattataatactcagggtcaaagtcttgttgcatcgctttaacaggatatgtagctaaatcctttaataagatagtgtgagtcataaacccatgagggcgcttcatttcgtctaggtactccacatacatttctgcggaggatactctagggttagctgtcctgaagtttatgataaaatcttcattgtagggtagcataacaaagttctctgccctgtttcgactaaagattaacataggtattttacctgtttctctagcatcgccaacaacttgtgaccaccataatttaatttctttattgtttaggaaagcgttttctaacgtccactcttctctttttttacattctactacgaaaggaaaacctgcctcaggaatagtgataatatctcctgagacgttcatagaagcgttccaatgcaaaccaccacttgcaggtaccctatgaaaaggagccccccaccaagctgttagaatctttgctattgctagctcgtaattcgagcccttagtcttactatgccttccgactttactatagtcaaccaactctgtaacccccaaaatcatttattaataactctagtgtagcttcagcatcctcatacgttgggaatacttctagagcatcatccaaacaggtactttttattgcagacctaacagatacccataaggattttcctgttcgagcaaatcttttatcatacttgataataaagctagtttccttgtagggatatattgaccatcttatcactgtactcactccttaacataggcagaaactcgttaacaggatttactcgtaaacaaatatcggttcctccatactcttcagaaagaatgttagctgtagtgagagcttcttctaatgtttcgaataactgcaagtctccgttaggctcttggttctccatcatagcaatagaacctccatcaaccaaagaagcaattatacagtaccctgtctttgaagaaagaggcacaaccaaccagtcgtgcactcctttttctaatctactcaccatcgttgtattccttatcttttgcactagcaagttcaattttagctttagctatttctgcttgcatctgagtttcgaagtccgctaggtctttagcacgagtttccttagccttttcatagtcttcttttgtaacccctagcttatcttgtagaatgatgtctttaatagcattgtcatcaataagtgattcaataagcttacgttcacggaacataagaccattcactaaagaagtaacgtcttgtactcgtgtttttttattaccgatagcttgcaactcttctaaagtaatatcagcaggtgctcgacctgtggcactatacattgcccaaatgcctagagcttcttctagacctaattctttattagtttttttacctagttcaataacattgtcttttttcttcattgtgtattttcccctatcctaattctttatataactgattgtgtacattatccattatatcagatacgttgtctgcatctttttggctgattacatctttttctactaagattgctatgatagactgattgaatgctccttgcacccgctcacccacaataacatcttgcataatagagttaaccattagctgaattgctttttctacatcatcataagttgtaggagtgtccccgtgtaacttacgtagttcctcaatcttatctttgttcttaccttcgttatcatgtaatgcaatgatagacgtaatgtactcatttaacgaaatatcttttgtcataataacctcctatatctattataccacaactatgtggttatttcaaatcttcttctttcacaaagacaccattaatcattttacccttgcgcttagcaattacattgtaagcttgggtcaagcattcttcggctgtaagtccattttgctgagctaagatgattagcgttacaaacacatctccgattccgtcagttagctcctctttatctccacgagctaaagcacctgcaacctccccaacttcctcagtgaccttcaagaattgtttactagactcagctttgtccaatcctttattttttgaccattcttctactaaactaactaagttatccattacttacttcctttcaccccataaggtacaattttataatatttatttacttctctatgcaaagaacgcaccatgctctctagtaacaatgtccgcatacttgctctaacactttttcttttaggttttataacaacagatagtgctcctttatcagacacagtaatcaaaccaatacctgagttcttaattctctcatcaaatactctactattatctttacctgtacggataccctttttttctaagtctttaaccaaatgctctctaagtttatctaaaagtattgaagggataacataatagttaaagtcccccttaaaagaaagtttagcttgactataaaaatcaggtacgctagtcttaatttcataacatctaaactctcctaagctgtcatatgttataaaatctacaatgccgtcagcttctcaacctatacctatactcacctcaaaacatccatacaccccttgcttaacagtctgcctccacaaactatgttcaacatgttttgtaagctcggtcttactcatcagctacctcataaggcacttctaaataatattcagggtttgttaatacactgtatgcccctgtaacataacgtgtttgatataatacatcatgaattgcattgtgtttctcaatcccatcagcataatcgtttctaaagctattaatatcctcacctagcttatctgcccctaattcaagaatagtacggacatctcggtggttataaaacataataggggacttaagaccatactttttaaacaatgcttcaatcttaacattatcaaaaataatgccgttaccccataacttaatctcagagtagtcttttaataagtcagtaagccatgtatgcagtttacggactagtatctcttctgaaataccactttcctcagaaattaatttgtgtaatactcttgcattatcggaatcggatgtccaaaattgtaaagtccctaactccatgcttaatttatcccctagagtgctcaagtctagtacaaagttaaatgtacttttaaaatccccaagctctctaacaacttcgtctagatggaaagctcctgcggaaatctgaatgacttgtgcatcatcagcaatacctaatgtttctacgtctaacattacatcaatagttggtttcatgtgttttatcctccttagattgacaacatcagagttaggattccttgactatctgccctaactgagttattgtttattaactcccacgttttttcatgacccattttgttagcatcatctcctacaggattgataactataaatgtgtttttatgattaacatatagcttttcagctagtgatgttatttgagctttcgcatcattatctagtaaaatataaattttttgctcagggtggatatttttcaagatagcttttacttgctcttcagtaacttgtttaccgaaagtggctactcctgattcacctactgtcaaggcatcagggacaccctcatttatcacaataaaaggagtttttttagcaatgttaagattaaatactacagtacttttagagtattctccatccatactaggagcattaatagatttaacaaagctactactatctattgctcgggtattccagtatatatagttacctgattcatcatgtgataggaaaactaggtggttatttagtgttaaagttttaccactaggtaagttaaccacactatgtgtcaaataccctatattatgtctcgcaatatcttgcaatgaaaatcccctagagtgtgcatataacaaaaacggatacgcctcagggttctgcaagttatctactagtcgtttataccccatcggtaaaggtggggcaacataggtgtgctccaactcttccttaggctgtatttcattctttagcgcgagtaataagtactcctcatcagtcagtcctagtgtttgtggagatacccatttctgttcagggtcataatcgtaagcttgtagctcctcgatagcctccctataagatattccatatagttgcataacaaatgatggtggatttcctcgggaaccacatttaaaacaatgccataacccgtctctagccccaccaccaatgttaagatataacttgtggtcatcattggcagaacagaacgggcagttgtatctaagttcgtcccctagatttttaggaatacccaactctgctgagaaaaagtcctctactgccatttaatatctaccccctagcgattactattttttgcattaagataagcatagtatatacttcacctaacttgtagtataactccaattcatcttggttcagattagctaaaacgagttctgctcgtgcctcttcgtctttacctgtaacctgttttacatcttgtgggttatactggtaatattctttaccatcataccatgtgttagagtctttgtcaagactatctttagaattttttacatcatactgaatgtattttgtagttgcttcatcgtacatagcatcgagagctctttgaaatactgatagcccatctagtacatccttaagggtgaaatcctcataaggactacgtatacctaaacgagtagcaaactcaatgacttcttgattatggagataaacttcttcattccgccacgtaggttcccctgtacgtaaacttttacccatgctaggtttattcttaacaccattagtattattattttctagaccataacgaggaataagtagtccgtctgtatctaccgctaagtagaacatatcctctttctcactgtatttatatgtgtaatgggagtttaacgggtaccaatcaaataatgtttttacagggaagcttgcatacatgactgctcccatgtctttacttgtaaacttaccgtttacttgaagagttccgtattccccctttttaataatgtctgttctcattaactttttcctcctgaatctactagtgaggtgattccgtctactttttctacagtaatcactttctcaaatagcgattttaaattttcattgtgtgtaattacgaatatactacctacagtcttctgtttatcttttagaatgtcaattacgttttcacaacctatgctgtctaaaccgtcaaaacactcatcataaacaataagattagtagctaagttagatttactaaaaattaaatcttgaattgctaacgcaatagctaaatcaatacgtttacgttctcctgctgagtttgttttgtagtcttcccctccgctaccattaacgacttgaaggtcaaaattgtcactcagtgagccatctttatttaatttttgtgtgagtaaattaacctgtatatcggaacctgatagtgtagctaaatacccattagctttttcatttaagaaaggagtagtcaagtctaatacatgagaacgaatacctttgttagagaaaactttgttgattaacacttcgtagtcttcaatttcaaatgctaagatagttaactcgttgtcagctacaacaatagctgagttaatctcttttttctctgctgttttcttaacaggcttaggtaatgattctaaattagctagctgttcgatactagaatctaaacggtattgaatatttgtgacttctgtacctatattttgttcttgattatttagcgtaatcaactgattgtttagttcttgcttacgttggttaatatcattaattgtataatagatattatccaagtcgttcttcttttggtcaagttgttgctgtaacaaaggtaacgcagatgcggtaggtgcgatagactcttcaatagctgttatttgctgatttaacttctctctctcagcttctcgatgagacacatctaactttgtcccgcaagcataacagacatcgctagtacctaaactagacatatttttttgaagtgtagctatttcctgctgtttaccttggtaagccgagttcaatcgtacaatctgtgcattaaactggttgtagtcttccaccaagtcttgaggtacaggtggttcttcgatagtagctaactcctgctctaatgctgttttctgttgtgcatactgttcttttatttgttctaccgaagcttgtgcgttggctaaatcagccgtcagaccctcaatgactgtcttttgatgtttaatcaaatcagccgtttttttataattctgagcttcagtctgttcttgataagttaagtctcctagcttagcgtttaaagtttgtaactctgtttgttttgcgctatgagctaaccttgcctgagctagcttatctttggctataacttgggcttcttgatatactgcaatgttagccacattttcaagtatctcttttttacctttatctgtagcctttgcgaatatctccacgtcaccttgaccgtacatgatactattaagaaacgtgtttaagtcaataccaaagagttctagtatcttcttattagtgttagcaacagtactttgagttaaatcattttctccttggaataaaagaaccttattcttgtgtttcttatgttttcggtatctttctatccgataaggtaatttatcaatctcaaagtctagtattacactagtgtctttaccaatcttattattaatcacgtcatctgcttttgcaccttcgggtgttatgtcgtataaagcccacggaatagcagagagcatcgtagacttacctgaaccgttagacaaatacgtttggttcgtattattaacaccttcaacaagaactaaaccttggttgtctagatttagctcaacgtgacctatagacctaaaattgtctatagtaacctttttaaagataaacatttatgtttattacccctctcttatttgttatacctagtatactacatatttacgtgtttgtcaatacaaaaaagaccctttaagggtcttaattcaaggcttttgcttctcttaagcaagctaatgctttctgctctacggcatctcctaactctttagattctacataggcagagacaatttcttcttctgaagtttctgctgtaatacctagtcgggaaccatcgttgtactctttctgaactgttattcgcatattagttaagttctcttcatcacgaatagtctgaactatttttgcctgctcctcgttacctgtaaacctgatataattgtttcttaaaatgtcatcgcttgggatttcatctcctgtaattgtgataaacattttattaggtatctcaatatactctgtttggactttatctccgtcttggtaaagtaaatgataacctttagtttgcccttcatcagagaaacttgtttgtatcgtattacccccatatatcatgtttgggagcagttcttgtcttttgtgataatgtcctaggtatatataatcaaacgcctcagggagcaaatcagaggctctgaaggcaccttctaacgtatgagaatactttccagtagttgcaccctctacaccaacatgagcaactaatactttaggaagcttgttgtctttatgtgtatcagcagtcttgattaaccactctttcatttcctcggtctcttcaccgtatgggagaccaaacaacatgaatgtggggtgcacaatagtttgaggagtactaatcactgttacattaggtaatgagctgaaagtatctagtgagctaactgtccttaaagaatttgttacactatcatgattacctctaaccatgtagactgtgacatctgaatatgcctcaaacatttcaaatacagggttaaaaactctagagtctacataaatacgtttatgaaataaatcaccgccaaagataacaggtaagtcgtcctctctagcttgacatagaatagtctctagtgtatctaactgagctttaaacctgtctgtatggtacttagcatcaggatgcgagaaatctttaaatagatgtgcgtgaaaatcggtgaataaataagctaatggtttcttactcattataatacaccatccttcactttatgtggctgttcaagccaatgttcataaaagtttttatagtgaaactcagccttaactcgttccttaggattccaatgcgctatttttttaagttcctctgctagttcttctttggaagcttgttgcatccattcaaagtttgtcatgttcatgtgttacctccttaaacatttttggaaacatgttgggatgtatcatcttctttccacccatgtgtctcccataatctacaatgtaatatcctttcggtatatggttcttagctaacaagcttggagcgtaatacaactctaacttactgtcgtactctactttactagaccctagaaaagcctctacctcttcatgattatgtccagtccactgaacatacgtgcatagcggggagtaaggtttgcaatatttcatgtcaaccttcccccagtctaattggtagtgttccataatagccatctgcatcgtattctaagagctcttcttcagtcatactctcgttcgtatcaggctcatcttttaatatcttttttgctctatagctatcagcaagagcttctgtatcaaagataccttctgcatactcgccatagttaacagttactgtatacttttccatgttatacctccttgatattattgtgctactggttgttggaatcccccttgtagtgcttggttcatcccatttagtttgttttgaacatcttgattgttgtactgtgcatcttttttcttctgtttacggatgcctgttacactttcttctaagtcctctaaaatagcttggtgatgtaacacctcttggtcagttaaatcacgcaaagtcatagtttcatccacatatttaaaaggtagcattctgttgaaatctgctcgggttctattacgtagtttatctacatacatacgagaatacccttgctcctgttcttctgtagtttggttaatagttaatgcaatttccacagggtttagcttttgttttgaaccttcaatcatagaagctgaacgaaactcagaagctacacctgaacggttcaactgtgagaatacccaacctaaaaagttgtattcttgagcaattctacgaatttcttctgtaagtttacctcctgcacgagattcgttatcggaacctttctcaaaagggttaatcattaagtcggggtagtcaataatgacaacatcaataggtttacccaagacaagagtttggttaattatctcttgctctaaacctgtagggcttaatgtacgaggcatatacttagcaatcacaaattctccccaacctttttgaccttcagggtttaatagttgattataagctttttgaatttcttcatacagtgaatcattcaaaacaccacctgccattaaagagctcttagcttgctgtgagaagacttgttcgaaacgtagtaccattcggtcaagtttttcctccaatggcaagaacagcacgttaagcccctgcatgacgtagttacgaactaagttaaccgcccatgtagttttaccgccaccatagggtgctaaaattaaaccaagctctccacgagccaaccctccgtctgcaatatcatcaatagcttggaaccctgttttgaatttgttcttgtgcatatgagtaagtaatcgtttcttactatcagaatctcggaagaagttgatagtttctcccccaccacccgcactcataatagcaatatcttgaagtttactaataaggttattaattgtatcctcatcttctagattaccgttacctacttcttttaataaagtttgttgaataagtgttttacgaatatatttttgcatgttctcattgataacatcctcattttggtcgaatgaatcaatagtgtataaatctttaactgtgtcataaaatgcttgctgtttttctgcattagcattagtttttaccattttatcttctaacataaccaacaatgtttctttatctaacggaacattgctagtctgataataacgattaatcagtaaggcaatatccatatacgccttatcatcgttaaaagtatttgtaggtatcttagtaaacgtttcttttgcaaatacagggtctttaatcgctctgtataggatttgtttttggatgtgtgtttgtgacattttgctccccctatttttttgctataaataattttgctcttagttctaagcctctttctgtgtattcatgttgaacagctatttcttctctaaccgaatccaatagcgcatcctccacttctcttaagtggtattcaatcaacttctcttggttgataacactctcatcaaccatagcaagttgatttggtggaatagtcacagagtttgctacttgaacaatttgcttattgtcaataagtagcttatcaaatttgggtacaaatgtcaattgatttcttaaagagtttagttcttcctccaaagagtcatattttttagacatcgcatctagttgttctatatgtctaactcgttctcctgtgtgtttagctctaatactagctacctcactatcactggtgtatcctttgtagcgccaattgttaaataagtcctttagccccatatgtcctagccctccttaatattaattatctgtgctaaatccaacatcccaaagttatcaattgggattttttctacaccatagtttctaattgcttcacctacatcatgagagttaaccccgatacctgtatcgtgagcaatcattcgactagtttctctaaatgtgttagctccttcaatagagaagtccatcagctcaccttgcttagcataatgttcgaactcttctaaagttgtaatttcctctttactcatgttcccgatatacgcatagtagttagatatatcagcattatttgccataacagtacgtttaacctcatgtatctgtgtaggaaaagcaagagtgtattgtgttgctgataatgaatttttttgcgagtataaagctacttgttctttaagatatgcacgaataatatttttttcatcttctgaaatatcactatccttaaggtctagtaatactgtattgtagtatctagttaaccgttctattctgtgcacataattattatgtttaatgtcgttagcatctagttcaatacctaagtctccatagtccactttagttaaccgcattgcgttaacagacatttcatctatcaagttagataagttacctcccattgaaacacctttgtatgcaaactgtaatgcttgtataatagggtacttagctccgatgtataatacccgctcattactcatcttacggtcattaaacctatttcgtgtccatgtataaaatctaatctgcttgttataacgttccatagcatcagcagaaattaacgtgttcacataaggtaacgcattaggtctagcttttttatgctcagctaagaaagtaacatagtcaaactgagttgttaaataccctaatggatttatatcttgctcatcaaaaatcctttgtagacgaacaaaaacattatagacaggagtacccacaaaatgataaggtaaaacatcccaattctgtgcgtattccatagcttttttgttcaagttgtataacctagtgtcatccacatgctgaagcatacgttctcttgggaagataaccgcataagcattatacatcctagagacaaggtaagctttgtaatacaactcaggctcatcaaagttatcaaaaaactctcgggtaacatgaggcatagtgtcaagcatctcattaagctcccactctctgcctttacgagctttgataagcaactcagcctcggttatttcggtcttagttctatactttctaagtggttgaggcttaataactctagggaacattaaatctcgaatttcttcagcagtttttgtatctgctgttattggattctctttaggttcaaaatttaaaatgtctttgttaaacacaattactgtccccccacctgttcgtccttttttagcctcaacttcaccaaagtttagctcttttattttttgaatatagttcgttactgttcgtacacttacattaatctcttctgctagcttagttctttgaaaagttactgctaaattgtccccccaactagctgacttgtcagttaaatggtttataaacgtaaggaagccatctgaaatgtcaaattcaattatttgttctgctgttaaacacatttagtggctctccccccttagtttatttgtatatcttcaatatcaaacttctcttgaacatatgtttttctacgctctttagagtgtttcaacaaatgcttatttgtgtagtcaatgaagtcgataattgtggcaacgttctcccctgtttttttcttacgtagggctcgacctacacgttgaagtgtttgtcttagtgatttaccacctgcacctaatattaacatatcaatacctgagatgtcaacaccctcatcagcaatcgtagtagctattaagacttttagtctaccttctctcatagcagttagttgctcttccctataatcaaggtctaactccccgtgtataaaggagttctctacacctgttttcgttagcatttcagaaattatatctccgtgctccacaatattaactaagataagcacacccttaccctcagagtatgccttgtttgctaattgagttattagtgtgttacgatattcattgttaacaatacataactccctagcaggcatataatctgcctcatcataaccttgtgggctaacaatagggaacatagttattttaggttttgctgaatgccctaaattaatcagggtctcattagatatttttataatggtcttattaaatatcgcttgtaatctctgccatagcattttgtcttttctatcaacagaaccagttaatgctattctatactgtgcgttgatacatttcgttagtgaatgataccaagtgtctgcactagtatggtgagcctcatcaactatcataacagcaacagactccaaaaagtctactgcttcgttatacttatcaaataccttcttatttttagactcaattattttttgatactcagcttcgtacccttgaatcctgaactttatttcgttatctgacccgcaggtgtataggacatcctcaagttccattaaaactttttcatccatcttggattttttagggtaatttttaataaggttgcgtaaagcaaatctttgattataccctttagctagtcttggtgctatttccttagctattttcttaacaacagcatttttacctgttagtttaagccctttttcagggtctgctgttaaacttgcatttaatgtaggtatcatcacaaaagtaatctgttgaaagtctttgtgtcctgcaccataccgacccacttttactcctaaccgtttctctattctatcaatggattgtgtaaagattgacgagttattcgtgaagaaggcaatacgctcccctctctctaaatatggaagtaattgttgcatgatagctccacctatttcagttttaccaccatttgttgcaacctccacaatacctacttgtttatctattgcttgaaaaaccgcatcaaactgatagtctcgtagggtaatagggtcatctccatctccaatcagttgaatgttatcaggtaaatcctcaggattcataaaggggtcaggtctatcatctacaatgctgtaagtgaatgtatatgttccttgtaactctcctaatatagaatctacttgatttaacaatcctgtatggaatgagtcatcttctttattataaaaatctattataccgtcccaataccctgatttgtatgcaggactataaaaatatccatcttgctttacacctaaatttctgtgcattgcatcttggactatgggaatcaattgttcttccccttcctcaaaaataatctttgaggtcataatatctacaagtatcttcattgtttccctcctattgtatctatatccattataccacaataggggcaatttaattctacttgatttaattgtatatctataataacatgtactcaagtatttgtcaatacaaaaaaagcctaaccatgttagactttttccagtgatttaaacttttctattaaactgtctacttcggctagcttaatatctaacgcctttgacttctcgtcaagcgccttttgcgtgtctgccatcgtttgttcttggattgtaggcttaaatattaaagcccctgatttggattgtctgtgtatttcaggcatgttaaccccccttaaaaaataaaactcctacttacattataccataagtaggagcagttattactattcactcttcattagacacattaatcgttttgcacgaggtctaaggaatgaattttgagttgtcatgtttaatctaactttgaacgatttataagttgctgtacctgttgcaaccttctctgcatattcaagtttattgaactcttgagtttgctgagttaccgttggtgggttagtaaatgatttccatgttttaccttcatctaggctgaactgaggaatcactgttgtgtttgacggcatgaatccatcgaatgaaaccttcactgtgttaaatggtgcatcacgtaaatcaatagtacgagatacgtaactaccttccagtgcagttaggaacccaacgaacatgatgtcttctaatgacaacaacggactaataaatctgttggcatcaaatgtagctttaagttttacctctctagctacttggttaacatcaatatccacgtagttggcaataggtctccattctttgtcgtcaaccgttacactgattggctcattctccataactatcttcatttcccatacacaacctgtagattgaggagttaggtaagtactcatcaatataaggttatctgctttaacgtttttcataacatcaaattcaatagtagcttgtgggttgaattgagctgtatagatagtaaatttcatatctgttgcttgatggattgtccaagcagaagcattagatgaactgaatagtacaccttgtaggtatgggttagagttaacagtctctgtcgggttgtcaatcttaggttgtcccattgttgcacaccacatagtatatttatcagaatctgtaataacaacgatacagtactctttacctgcctcaatcattaatgggtcatcaaacttaacttttgtctcagcacttgcatcatcggagataagaattttatcaggagttaataccgtctctgcatagatagtcttgttaggttgtccaccttctgaaataccacgaacctgaacaatgacgttgtggttagggtctttacttgcaaagtgtaaaccaaaactggtgataactctgttagattgtaattggaacgattgtgccaacgggtcatacaaattaattgttacacgagttctaacaataatatctttagttgttttcttagttccttgagctgtatacgtagcagaagccatattatcattatttctgatagttacttcacgtacaccgcatcggatacccgcaggaactgtaatagtacctttgaatgttccgtctgcgttagagataccagtacctgtttcagaacctttcttgtatccttcagcaggagtaacaggaattgctaaaccatcgaaatatacttgcagattgtttgtattaggtagcaagttctctgcctcaatcttgatgtcaatttgtctcatgaactctatcatgttagtaatagtttcttgcccacccgcagttaggatagtacctgtacgaccgttagctctatcatacgcatgagtgttaccttcccatccttgaccttcatctaatttaataccttgaacttttagttgttcgtcattaacccaagactcccctttatgagcccaccatctcttaaccgtcatcgtagaagtttcttcttgtgtcactgtaattctgtcttcttcaatccagttatcagctgaaggttccagttttagtaacccttgtcggttaaacacgttatagggatttacattaatggcttctgttgcgaaaggttgtctaagttctacaacctcagtaaatggtgcagtaaccaatctaccccaaacatgagcattagagtcaccttccaaaatcttaggaacaattttgttagcttcatcgtaaggtaacgtaatttctgcatcctcaaaactgaaagcaattttcgcatcagggtgacttacatcgtatttgtctaaagagataaaaccatccgagaatactccacgtaagtttaatgggttctctcctgccattgcaggttggtctagagcattaactgcttcgttatactcaatgttctctacacggaattttaatctttgtaaatcttccatagacaatctatcaatagagaatgaacgagcgattgctgtatcagaatcaggatagacagttactgtacctaggcgtaaagttaacgggtctaagtggtttggtgcttctactaaacgaagagactcaggttgaccttctttgatagtaatgttaccattcatatcaataaccacaaggtctgttcgagctaagtagaagtcgtagtctacgtttactagtgtttcgtctacaggtttcgaacctgtcatcccgttaaagtcaatccaccactcacggttgtctccttcaccctcaatggtgattttatagtctgtattttctaacatagctttgttgtaaatatatgttacaaaataagtactacccgcaggaggctcatctccgttaggtgcccatgagattgattgtccgttaattacttgataatctgtaccttgttggaactcttttgcattagctccttcagtccaaactctctctactttaataacagaagtgtttgctaagaagtctgtacctcctgaagttactcctcggttaactgtttctttagttacacgtacttgacctgtaactcgggtaacccttgatacaggagcattacctagtttgctcttacgagttgcgttttggtaatagaatccttcgttgttaactgaacgtacatctttagactttttaaggtctaatcttgttgatgtaggcttatctactttataccctaacacataagcacgtccaccgtcaactactagttgaataaactcttcagatttagtcttatgtttctctgtgtacaagtcgtaaccatgtactcggtatgaacctgattcatcgtaagttctttccgctaatactttgttaatcttatccatctcaggattttcagtattaatgaatagttcaccctcatcaaagatgtacacaggagcagaagcgttatcgttaactgttaaaataaccacttcttgaagtctgtcagccccttcagagaaggcagaaggaacaccactggtttggtctagtaacgtagggtcatcctcagatgtaataacatatctttgtaatttaactccaactacttctcttcctgttcctgtcattgtaactgtttgttgcttaaagtttcttactcgaccattaagatatactaacccatctttaactgtcaattcgttacctgttttaatgaaatccatacctgattgtaggttaccatcaccaaggaacgcatcacctagtttagctaaaccatccatagccatttgctgtgcttcatttagttcagcttgttgcaatggtctatcaggtctgtatagtaccatatttctgtcttgttccgctctaaaacggctaagatatggtgtttggttaatatcttctaatttgatttctgttgccaaacgttctcactccttataaaatttctttggtgttggctactgagaggatgaatctctctttaattcgtacttcttctgttctattttggaattgtttatttgcaaagaactgtagaatacctgtacttttaacctcagtaggtaataacactttctttgtaactccatctttaggtactaaccctgaatggatgcctacttgtctatatgttcctgttggtaaatctgttcctaacacttctgtttcaaaataaactagtgtagctttttcttgataagccttatccacaggaatcaaagcatatcttgaccctccatatgttatggtagggtatgaagtactctcactttgtgttagtggtttacacaggcttactttatctacttttttatacccaattacttcttgcaatactgaggtgtttgggtcttccgcaggaggagtattctcatttgtccatgcagttttctttccgattgctagatacgtactgcttgctttattcacataatctaaactagcttgcactctagcatctgtagtagctattgccatttattaacctcctatacttgtctctaactattaatatagcatataattgcaaaatagggcacttaaaagtaccctataatcattataccatagattttatgctttaggctgttacaacctcagaaatgttactcacaagcaatgatttatctatatcatatcccgtagtcactttgttcgtaaatgtgtaacctacatagtcaatatctacaggaaccttagctgtattagtaacctctaactgaattgctatgagaccttcagaagagatataactctccatatttcctatctctatattagctaacaaatctacttgtgtcaagtctttacttgatataacatcccatttgtttagttcaaagtcttttaactgtactttcaacttagttgggtttgttgggctagtaagagaccgcaaaacaaaagatattgtagggttcttcatgaaagaactgtatttacctttgttaactacagaaggactgccaccaactaacttatcataagacttaggaaagtttatgcttaagtaatctcggatgttgaagatgacatataaatacttatcttcggtagaccgtctatctactaaaccgtcatagttacctagagaagcataactcacattatcaagttcagttaattgagctttaacttccgcaagagtagttgtgtctaatacatctattggtttagttacctcagcaaacacctctaagtttttaactgtaattaaccttcctgtattgtaagtagcaaagaaggctaacatagcttgtggctcatctgctttcgataatctagcacggaaacgtaaagtgtatctcttatattccgttggtgcattagatatagttactctattagaaacaaatttaaggtctgagtttcccattgtatctacttcatgtaatgcgtactttgttgttgtcccattttgaaagtagaaatctacagctcctgctaatgccaattttaagtcaaaagtaactttataccatatatctgttccgttggtatctattgcaggggctaagtcccaatcagtactgttaacaaattctcgacttccagtcttctcaagtttagagtttgctgaaaggacatttccagtctctttgagtgctgttccatataaatgaatatgctctctcccgtggtcaaacgcacctgctaaaacatcttccccattcaacaatgacctgttggtatggaatatgttactagttacggcatctccacgtatatcagttgtcttagctgaacctctaacctctatacccaaacctgttagtcggtctaattcctgaatattatctatagtcatctccgcataaggagatttaacatgctctgaggtaatgtcatttcctgaatcgtatcccacataaaatagtacacctgcgggtttaaacgcccatatgatgtcaataatctcaggtgggaaaggtctatcaatggaaatatcaatgatagcaaacctatagtaataacccatcaaatggtcttctccattcaatttagagttgttagtatagaaaatattcttccacggctcatatatttcaatattggcatcattatcttttagaaaccatttaattgcatcaattattgactgaatagttcctctaggtaagagggtgtgtcgaatgatatgctctctgtaatggtcatcttcctcaccaacttctctgtatatcccaaaccaatcgccccatcggtctaagaactctcctgtagctgtctctagtgaggattggattttgctttttattgtgtcttgctctgcttcgttaagaacattatctagagcattaaggatggcaaagttactgtcatccttaacatctagtcgtttatctctcttaagcagaggatgtatatgttttttaaaatttcccataatatcctcctatattaagtctacagttacgtctcctgctctaataatttcagatttttgtacttttacattttgggtgtaattatcaatcttgcaatcataaattagaacatcgtctatattcataaccgcttgaatcaaatcagctagcactaattcttgtgagacttgttggttgtttaagtagttccgaactacagatgttactttattctctgtctctgagtttatcctactcttgttagatagtgttactgtaatatctacaggtaacaaagttttagttacaggataaactaacaacctaattcctgcgggtctatagttttctatctcacgttcaatagcagtaatcattgtaggggataggttaccatttctatcatgggcataaatctctacctgacccacttgctcatggatataaacacctgatacttcttcaacctgcctagtaccatagtctaaagcttggactgtggctctacctctagattctacaaacgcatgaaatcttttcttaacatcattgatactttcttcttcagtacctgttaggaagtcttcttcgttaaatactcgtttgacattaccaattccattaatcatgcggttaatatagcctttaggtaaattacctatatctcctgcacgagtagcatacacatctactttaaatgtcacggttcctgcgggtattaaatactcttggattgtttcataagcaatagacccttggtaaccttccataatagagtcaaactgtgtacccctagggataactagtgcatcctgagtgatagtatggaactcaatggttacctcaccataagcttttttagcctctcgtttatagaaattaaacccgttaaggactccttgttcgataccccacataatgttttctctacttagcatgtagtactgttctatttccatagaaaaagcttcatagattgacaaaatagtagaacctactgtgaagtcattaatagcactcgtattgacaagagttacgtcaatcaatcgtgataatatttctgatagtctttttaatctcattttattcctccttgtctactacgactatttgaccttcactgtctccttgaaccaacagctcaaaagattctctcagtgaccgtatctcaactaaaaacttacctgtatactcatccccattaacctctgcggagtctaacacacaatttgatactcgactgtctgtttgtactactcgacatacttctatctctataagcttcattgtaacttcatctgctttaccaaaaagctcatgaagtttagagccgtattcgggatgtagcagtaaagagcctttacgagtaagtagtttagcagttaatgcttgctttaagttttcaataccttgtacagtggaaacatcccctgcatagttatgtgttaaccctaacaactcatcactcgtaccataccgattgtaatatttttcgtctgaagtcatatttaggtctctaccgaaagttaaattaatgatatagtcttggtcacgcctgtttaacttattaacatctgtatctagtaggtcagcttcaaaaggtataattaactggtcaccccacacaactaagtgctcaatgtcctgcaacttcataaagtcatcactaacaatatacggatactttagattattatactcagctattgcaatccaatcagatacgtttcctgtaactttatgtgcaatgctttgcaaggtgtctccctgctttatagtatattttttatatctagccatttgcaccaccctttagtaaaggtaactggttttcaatataacctaccgcaacacttaaactatgcaaacgctcaactatttccacatactcatctttatctcctaagaaatcaattaagtatttaatgttttgcgttgtttgtaataagtccttagattctaacattctaagtaacgaagtatcctcttcaattgcataaactagagcaaaagaatcaagtataatactttgtgctagcttatacatatacggatggatgatactaagattactatttattagcataactgtcaaggtgttattatttaactgcttacctgtttgttgtatctctttaagatttatcttatcactaactcttgagcctgcttcactaacttttaatttcggagtataaaatctagaaataaagttaggctcctcggtgtctatcacgtttaaaatgacatcaccttcagggtcaatatttaatgttgaaatgaatcgcatcaaatccgatgattgtgttacttttgacatattaaccctccccgtaacctatttgttgttttatttcgtctactccatatttataagccccaacagttcctctagggtttaccactccgttctccccattacccgagaaactagctaaagcactagctcctataatttgtcctgtagacattactctttgattaatagcctctcttgagttactattagtattctcggtatctccaccaatactaggtacgttattcccaatgttagggtcaactacttccctatcgggtggcgttcctgcatctcgaataacaactaaacttaacttgtagttataaagtattggttgttcaacatcacgctccaaagaaatagcatcaggagctaaatgtacgatataactttctccgtcagtgaagttatggaaggtcagctcatttactgacctattaccattacctccttgtgatgcgtagtctcgaatataagaacgtaagatacgcattctatctgcaccagtacgaccttgagcatccctagcccaacctgttgtacctgaaaaggtgattgtctctaaatctttaccaaagtcctcaatgataatatccgactttgttttaagaattgttgctctttgtggttcactgtgagaataattgtttgggtttatcttaaaaaagtaccatcccccattggcgagctcaagagctattcttctaagatacgatgtgtgtccatctgcttgtggcatttattttttacctcctaccattgtgtaggacttacattataagtagtccctataattaaccaagctcctgcgcctacgtccgcatagttattagtcccatatcttgcaagtgcaatattaccattaggtctaatagtcataaaccatgtgttgatacctgacccttgttgcctcctatgaatatctcgctcaggagtagcccatgaaggtatggaaccgataactacactttctcctgacgcaggaattttactgttatttgtcaacgccccatagatagtgaccgtattatctctcctaataacctcaggataattactaacagaagacgatgacgtatcgtacattttaaaaccactagcaggtgaaactgcgccattacgttcaagagctgtcactttccacgtactccatgttccattataataatttcgaacccatgtatttggataccctgtgtggtactgtgtgaaagtttgtttcactcctgcatgttgttctacaagtaatgaaaatgccatatttacaggagtattagctatcgtagtggcatctgctgttgtttggcttctataaaaacctgctgacatataattgtttaaattaccattcgcaggaatatctataggagcatacccaccaatagctttaactgtttgagcttctaaccttgtagtttgaatattactagcaaatacttgagtagcgtataaatcataacccatagctaactgcaaggctttttctgtacttggaaacataccaatacctactgatttcaacttagtatctaaaaatagtaatggaataccttccgcaacaaatgtctcatacgtagtaactatatctaatttatcttttacctctacttgaactatccaagaatatgtgttgtccaaagtgattgttgtattaggtggtgaagatatattacctgcacttgcattaaaaggtaaatctaaatctgcactccatatatcacttctaggattttgcttgtacctaacacgagcagacatgatagtattcttttcaacaccaccaactataacccgagaataagttcccgataatgcaatgttcgttgtcgtctcatagttattcacacgagcaataacaggagatatttgtggtttgctataacctaatatatttacaggtgtactccacaaccctgagtttccacgactatctataacagtaactgttaagttaccgttgctatttgcatttgttgtacctaatgctattgttgttgcagtagccgtgtaatttatttcttttgtggctccacctaaagcaactcttatcttggatagtgttgcccctccatgagatgtccctaaatttgcagggatagtaacagaaatctgagatactccttgaataataatttggtcactacctgtgagggctaccgactttgcattagtatctttatacgtacttcctgcctttacatcgggggcatataaagctgtgtctactctagcagttatagaacctattgaagtgtttcctccgaactgaactccgtcaaagaaactttgaactgttacactacctacacctgtgttggtattctttatgatattcaacattgtgtctacatccgcttgtgttaatgggaacgtaaagttttgagctacacctgtaacttttttactaaacgaaccaaacgtccatgtagcatcatatctaaactcggctcctgtgttatagttatttaactttacagggaatcctgaagtgctaatagtgaagcctgctactgtaccccctgctcttgcaggggatgttacattgtaagtaaaactcttagtgtcacctattttagttcccttattataagttgataagtctactctacactgaacgcttgttctatttgccatcttctgaactatttgtttccgttccgcatctgtaaaattaaaggtggcactggttcctactccatttaactccttgataaaagtaccatctacatgaaatcttgctttatggtcgaaagctgaactggctctacttattgaaatagaactattacctgtaaacacaaagttactacctgaccccgtactagccctagggatagtatttaaggtagcattacctcctaccgaaggtttttgatgtcctgtccctgaccagttaatatcccaaacatggtctcctgatatatttacttgcttagacccatcagcattatgccctacagttactgtatgtctacctagttctcttgtttgccctgctttaactgtagacgtttggttgaatgattttttgtttccattaatacttatactagttgggcttgctgaggcatcattaattgtagagtaagaagttaccccacgtatctttagtatagcagttattgttgtgttgttgctagcgatattttgtgtaccactccactctaaaatcagttcatacgcattgtttgcgaataaagttgtccactttccacttaatgccatttatttacctcctaaataagtcttctcatatataattatagcacaataacagcaaaaaagggagcttagcccccttttagccaatgaatgcccaaccaacgttcttgtcagaatcaattggtagtactgttattgcacccatttgtattttacttctaacttgaatttcctctacttctgtagttttaccattcagagtgaaaattcttgtcatttcattacctacctgagcgtatcccgaaaactctgtcggagtaatcaaggtataaccatttgtttgattgttcttaactgtaataccattaatatcaatcaaaacgtttgtgttatatatctcagatgggaatggttgccatgtcaaggctaaagaaccaatgttaaacatgagaccactcattgttactgtagtgtttatattaccccatgctaccatttgaacagatatgtttaaatctgcggtgtcaaacgtgtaagagtacttagagtactctccaaccgcaacaccctcttcagcaccaatgaaggctaatcgtttgccgtctgcaaacaactcaacccctgccccaccatgagtacctgagctcgtagattttttcataaagaacgacattgtatatgtccctcttgcaggcattaccacgttctgaattaaccgaaccccacctgctttatgaacaaaccctgacccgaaccctaggttagctagtgcgttatcctgagtagttgtactcagccctgtatctgcattagcatcattagggttagctgaccacggagtattatctgcacctagttctagttttactgaactgaatttcacaacctgtgagggagtagtagatgtatcaaatctaatttgacgtgcttcaacgttaattgcatcttgaggtatagtaaatgtaactttagatacacctttagaattggcaggtatgttattacccccataatctctatacgcattgtttgcatttggtacacgaacataacatcttgcaggatttgctcccgtctctaagtacacgcttaatgtatatgtttctcctttcacaacagtgccattacttaacatattagctccattggttattgtttggtctctgtaatcaccccacccactaacagttacagattttaatacactagtagttcctcttaataggtttttaccttgtagattatcgtcaccccaaaagtctaaacctgagaacccaagagagtttcgtaacatattgataccccctgcttgttggattttaaaatcaaaaccactaacaagctgttctaactcagactgtctttcatataaggtgctgtatgcttctcctagtttttgctctagtaaactttcaaatgagctatactgactgtttaattggtcaatggtagctaagtctagtaaatcttctgagtttgctttagtatcaaataatgaggtgaagtcattggactccaatactgtattagtaatgctttccgcagtaattacttgctcagcacttgacatacggtctattaggtcacgaccatcagaatcactgaacgcacctatttctttagcctcagtaggtgacattttaacccacgttgtaccatcccatcggttagcaacgttaggtaccgcagaagtatctacccatataagacctacagcagggttagtaggtgcgctaggttgtttcatgatagcgccctctttaccattaagctgaatctgtttatctacatcgacaaatttagcatccataacccatatatagtctctgtaattatcgctatccttagtggatgtccctatatattttgggtaggcattttcataatcatctgttggtgagggtgtgtacattgtagctacatcgctaaactctgccttaactttttggttgttgggaaaacttatccaaagccaataggcaccatcgggaatagctaaacggtgagtctgttggtttgatgttcctcttgaaatgtacacaccgtctttatcatagtagtgtaccctaaagtatagaccatcagtattagcctttgatactatcaaatactgttgaccagcacagtatgttttatctttgttagtcgcggtcatttgtgcgggcgttgtgcccgatggtacgtcggtgtttgactcaagtaaccacgtattatctaagcgtgtgctttgaataatcaagttctcgttaggatagaccttagtaaatctatcactaccatctgcactccaagaccacgcagggttaacatcgatacctgctaccacgttattgatatcattctctaagtcaaagtgagatttcttccaagcagtactcttcattcctgtttctaactgtgttttagagaagtttaatgaagtgaaccctttggctcccgatattctacaaataatcccttccgtagttgaagaaattttagctaacacgactgctcgtttaaccccatcggaagggttaatgatatctgatttgaactctttccatgagccattatttaacaagtaaatctgtaagtatgcattacctcctgtaacactcatgtctgcggaaaaggttacatagtctccatcattaagagctgttagtccatagttcggtaacccgaccttagcatccgctactgtagaagtacctatagtataataggtggctcctgccgatggatttggaaccaacttaatagtatccccgtcaaacgtagctgtgccccccactgtagagtagtaccctacgttcttaaccattagtcttgggtactctttattccctgagctaaatgcaatgtagtttgtacccccgataggagttttagcaatctcatcttgaatctcagcttttgagtctaatggactaggagaccaagcagttgctttactaccagtttctagtttcatccctgctatttgaactgtccctgtattagcatccgccatacctaaagcatagttaatcttggttgttgcttccgctgtcttccaagtataggataccctagtccactttgtccctactgttttgttagtaacaacagtatcttctgtagacccacttttctgtaaagttgcagtaactgtacctgttttagctttagcccaaaaactaatagtgtattctgtcgcaggaagaacaactacaccttcttgataataaccgaacttatgcccatcccctgtagaagtttttgatatttcaaaaccatatcctaagttaggcaaacctgctacttctactcgggctctagttcctacaacattagatgcactagcccaatctgtccagtatgtgttatctagcactaagcctgagtttcttaagccatttgtcataccaatttctgtgtctttgatttgttgtgctacttgtgcttcagtaaccttttgcgagatttggtctgcttgaacttttagctccgcagtatgagtttcgacagtaccctctatagtctctactttagtagctagtaaagcaatagcctctgaagtttgagtaatcttagtttctgcaacatagatacgtccttcatgctcgtcagtaatctctttagctttatcagttacagctcttaacaatttaactttttctaagtagtagtctgaaaacgttgctcttagttgctcaccatcaacagctacagtctctcccatgtcgtcaaatagtttatttcctgtaacgtaagataccaacgcattgtatttagaaacatagtctgcggtagctacctcatattttgttgcttgagctactacactaggatgttctttaacaatagtgtcgtattcacgtttaagctcatacttttctacaggagttagtttaccatcgctagccatgtccgcaattttagaattggctgtgttagcatctaactgagcttttgttgcctcttgccatgcgtttgttgcatctactgaagcttcagaagctttcttcattgcttctacagctagttctttaatatttaaaagtatagctgttagaatagctagacgtgcatcgtaatacgccttaaacttcgctctaaactcttttgggtctatcgcagtagtttcatccatcttatcaaacaaaggcgttagataagcactcagggcgttgtaggcactaacgtaagtcgtcttatctacttcatactcatctgcttgtaaaatataagttgggtactcatcttgaatgataacccattctcgcattaaagtatctttttctacaggagtaattagaccatcgtcagacatatcatcaatcaacttagttaatcttacattgtcttgtttaatcttttcaatatctcctgcaataaggttcacttcttcagttacaatatctttaacttgagcttcggatactttcgtttcaattaaacctgccataataacaagctcactactaatatcgttaacttgagtttccattatctcagttttacttgcaataacagtaagcgcttcatttgtctttgttacagacatgtctaaaattacaagctttttaccttgctcatctaatgtattctgaatctcagtaaggtctacatctacatttaacccgtttgagtaaataccatcagctttaacttctaggtacgtgtctccgttagctaaaaatactgtaccatcctctgcaatacctaactcagagctttttagtgcttgccctacaatcttactatcaaattgttttctaagcttaactcctccgttaggggtcatctcaaagtaagttctccaatcatcagctttatccattgtagacatacgaacagtaccatcatctttaacatggaataaagtaatatgattgtcttctccacctgattgcttcataactccttgatgtttaaacaagatgtttggagcatatgggttcattggttcgatttcttcatcgtttgaatagtatgatgattctagttcactatattctgtaccgtggtttccgtctgtcaaagccgatgttttattatcatttgaattgaacattaagaatgatttacctgtaaaggttacagttcggttaccttctccgtccacattctcatacgttaatgaagggtatagactaaatttttgatttgtttgtctaactagagtatcatcttgataatctgcatttttaaacggagttctagacagcatttcattaactgtagaatttccgtatacactcaatactacaggtgctaatttgttctcattaacaaaacctacaagcacagtatcccctacattaacaggtttaacttgtccgtaaggttgtccgacagagttacgtccaccaaactcaagaggaagtctggcagaaaacttacccccgtcagtgtaagaactctgaaatgtgtccttattacctgacgtaacaaggtctacagaattatattgatagtttacttttattacttgggctaatatcagagaagatacctttgtaccttctttataggctctttcccattctgtacctagccctgattgaaatactctctctgccatttatgttcctcctaaatttgtcttctcatatattaattatagcacacttactcccatcttagtactgcaccgttgaaaaactcccaccagtacccatttgttaagtctgcccgttctaaacctttactagcatcccaatctcctgtaccattgatactaataaactccccttctccataatagatacctacatgaactgtatctgtaccgaaaaagattaaatctcctgctaatagtttatcaaaaatgctgacatgcttttgcccttcagtaaatattactctaaatctagtatcatgtcttatctttttaacgttaacttcagaagaaccaccaatcatttcaatccctgcatagttatagcaccagtagattagctgtgcgctatctaaaacaaaaggaggtttaccctcgaaagggttagccttctttgctttaagattgccatgactgtatactgataggaaacctttatccttggtaaacttgtctgcgtattcaagggcttgcatagctacagcgccaccttttgctcctaaacctacattagccatctttcttaactccttttattctatagtaatacacaggtaaacctcttgcatcccccatgtaaccttgtgcaggtgtctctgcgataccatttgcacttgaactacagtgaataatattgtttctgtctaagaacatccctgtatgcccatctgcatttaatgaagctcctttaacccctgctacgaaaatatctcctcgttgcacatctttcttatctacagatattaacaagctaccttctaattgatacaaggattccgtattacctagccatgtaccttcaggtagaatacctgcgtatatcaatgcagagaaaacggcggctgaacagtcatatgaatttggtcccgttcggggtccattttcacccatactataatgaactttaccctcacgttctctaaaccatgaaatggctttctcaacttgtttagaactagatgcagggtagttacctgaactactacttcctgagctacttcctcctgaattttgagaagctttaccttgctcaaataactcagctagagaaggctctccaagcaatccacctttaaactcttctgatttaccccaaaggttagagaatcgactaattcccccctcttgaagtcctcgtgttacagatagggtcgtaacaaaccctgacgagtagctatagtcatgttgaactccttcaatgtaatactcccatatttcattgttttgctcatcgttatagattagtctgttacccatacggtaatttggatgacctacaactttgatttcccctgcgtagaagtttccgttctcacaataccaattcgttatcttttcagtaaagattttaagtgcctctgcattgacatcttgagcagtaggtaccccatccgttgagttattagtgaatatcttctcatactcagatttctttaactctcctcctgcttctaggaaagtggaagctactgtcgttgctttatccttatcaacacttttaaactctttcatgatagcatctctaacaaggtctctatcctgaatggttttatctttatagtctttaaggaactttttaagcttactgtaggttatttttaagtctcctgcatcatccacattcttatcattaattcccgtaattctagtaaaatcatctatagagaagctactagtctttagatatgagtcaatgatagcgttagctttattagtgtctattcttgagtctacagaaactatttttgaagctactgctgtctttcttactctaagagtattaacaggttgtgcttttaagtaagacagaataacagagtgcattgatttaacactagagtttgtactagagtttgtattagttctagctattgctgttctagcttgaactgcgggactagcacctctactgttattggaagagccttcctttttaatgactactttgattttctttcgtccaaaagctaaacaatcctctacagaagtcatgtgaatatcaattctgttacctttgatgtccccacctgtatctcctgcaatatagttacccatgccttcaacccacacgtctgaacctaaaggaataaccgaagggtctactgctagtaccttaggtcgctcccgtaaatcaatacctgtagcggtcagattgcttagacctgcctgtttgtaactatatgcagttgcttctacctcaatctctcgaccttcaggcttatctgtagtatctgcatcagaacttgaatctgaatcatcagttgagtttaacactgattgtaaatatttattctttaattctaacttagaatacccgtatttgtcaactaaagattgataataacgagggaatgacccaaaatctacagagtccatccctaatgggttatctacaataacattaaatatagatgcaacttccgtgtcatttttagctactgattctgaaataactgcttttgatgttattacatgcgcaggtaaattattccaatcactctcatcaaaaggagtccgtctcataattagcttgcaagtttcatcttgtgtaaaatcaaagaacacttcgttaaatggcttttcagcaatatcatctaacatttgtttcaaactaccttcgtaatttataaagggtagcgggttggctaaactttcgtactctgtccaactatctaacccgtcatattcaaagaactcatctattgtcctaccgtctttaaacttataacgagtatagttcaaaaacttagataacatagagtaagctatttctgaagcattacgtgtgctgaattgaagtcctgtagatgagtcatcaggcaaccaaccaacctcagataatacaacagatacttcttgaataaccccaatctcaaaatcaatcaatatcttagcaaatgattgtcctgatattctgtacatcttagagttttctccatagtcagcttctaaacgaacctcgttaacaagaccaaccaaaacagtgtcatttgttactgaggtgaaggaagctgagttttttgtgtcaggtataatcttaagaataaccacatcgtttggtgctaatattctatcccaatatacatctcctgatagcacgaaagagaacactgcggagtcatcttccatagcatttttagttgtcatactgataacactctgactcattaatttatctgaaggcacatcatctttacttgtagcatatctaatgttatattcacttgtttctgttataaatttaataccaaactcagggtatgctacgtacctattatactttctctcaggcatttctaacctcctaattatttaaaaaagagcttagggataaccctaggctctcttaagctctttcgagtaaaaatctattgcgctgttcaagccttctgtcacagcacttgctactctagcacctacttgtctagctccacttgcacttcccgcatcattaactgtgacattcactgagttagctgtgctgaatgtttgagcttgtgctttacctttcgtatacgattcagaacctttcatgatacttgctattttcttatcccaatcagggtcagttgcatactcatgttgtccaccattatgtctcatggtttctaatgtggtttgtcctgctgaatagaagttgtctgcaatccatttggctccacccgtcaaaccgtctccgtatttgaatccgttattagggtcgttatcaaaagcaccgataccgaaccagttccctgcatttttgtcaccattcttagatagtgcagaagttccccatccagtctcaacggctgagtgagcaatcaagtatcttgggtcaagacctgattgttttcctgcttctaagaagtcggctcccataccacgcatagcagaaccttcaggcgctacagagtcaatccattcgtctagttctttagcagtaagtcccataactgttttacctaagtcatgtttagtaatgtcctcatttgtccatttcttaccatcacctaagtaatctagggaaccactacctgaagtaccacctgagctatcgcccccgcttcctccattagaattaccgaatattccattttgtgctttagcctctactagtatttgttttgctctatctagtaaagtagaatagaatgataagttagcattttcatctatgatgtttttctctctaactttctcagattgatattttttattgttagtgtctttttcttcttcgttcttagctttgttttcagacttcttgttagaagctttatccttacctgcactaagcccgctttgttgaatctcagaagcttcagcggtttccccaccaaagaatccactaaccttttctttaccccaattccacattgaggagataccttttttaaccatcttatcaggagcagttattatatccattcccttagagataacatctttaccgatgttgaaggcacctttaagaccgtcagtaatcttgtctttaccccaagagaacccgtctttaattgcttcagtaactccgcctagcttttctttgctccaatcaatagctccacgacctgcgtttacaagaccttcccctgctttagaacctaagaacgctccaccgacaccaccgattaaagtaccaattccgggcataattgctgtacctagagcagaacctcctgccatacctgcgagcataccaccatttttacccgtggcttttactttatcatcagatgtggcaatatcagctaccgcagaccctacagctaaccaaggagctaccttacctaaaacgccccctgctttacctaagaacccacctgctttacttagaagtcctcctgattcagcaccgcctttaaacaatccaccaagtttaccaaacataccgcctgatttacctgctgtctcagcgccacctttaaagaatccaccaagtttactaaagagtcctgtacctgcttctgtagctgttgcactacctgcacctgtaaagatactctttccgtattccatagctttcgtacctagtttagttttacctaaaacatcccctgctttacttactacagaagaaccgaacttggttttagtaagtcctttaattacagaacttatacctgacattcctccactcattgctaatgtggcagttaatgctgttacggctgttgtcaataagtataacggagtaggtagcccacctaaattactgttgatgctacgtaatacatcaccataatcgttagtcttagatgcttgatactcagttactgcctctgacctgtcggctgtaccttctttagagtttttgtagtcttctgcattttgaccatatttatcagaacctagacctttgttctcttcagaaatcttagctagtgtatcgtcatctaaatccttaaacccattactagactcaaatatacctttaacctcatcaggacgtaaactagctcccatcttgtctgctaataaagtaaagtactccatcttagcatcatcggtagccattccaccttgttgagcgtttgcataattcatcattgtttttaagttatcagggtcagagatacctttatccagttgctctctaagtttaaatctaccatccattccttggtatttagtacctttaccaaagactagactaagcattgggtcatctattgagttacgaataccttcgtcaagagaactcattactttagagccattttctccttgtaatgcacgtccacccttttcactgaataaggtttgcaatgcaactaagttattcagctcatcgttgtttccgtttctacctgcaaagacttggctactaatactattaagggcatctagttgttctttttcacgaccaaccataccactttgctcaatagctcctaggaaagcctcttgtattgcttttgcttgtgttgctgaatctactgcaccacttcgcatattgctctccataaagttacttagagtttcattatctacaggaacagccctagaaccttctgctaaggtacgtgtagtatcatttaggctttcttgacctttgaatcccattgatgataagatactatcttggaactcaagcatctccccacctttgtaattgatacctttttctagacctgcttcttgggcttgtttacgaactgctctaaagtcactgtttcctgtaacttgtcctgcacggatacttggctctctcatagctttattagccgtagcacctttagaatacatacctgcaaaggaaccaattaaagaacccataatagcaataccaatagagttagaacgactagctacttgacctgcaaatgactcagggttagcatcaacctttacatcattcattttattagcagtttgtttaatagtctcatcaaaaccaccaatggttgtattcatttcttggaaagctttaatagtatcctctaacactcttcttgagttttttaacgcagactcttcgtttatacgctcttggttagttttactagtatttttagcaagttgagataactcttggtcaatcgtattaatttgtttgtttaaatcattaatacgtagttcgttatcttctctcattgaccctgccgtgcttaatgtattcatgtctccacgaagtacattagcttggttaaaagtagctttacctgctgaagagtaagaattagacctagactttacacgtctctccgttgcatttaagtctctagttaaactcttaacttctctcaagtatttaatctcatcttgtaactcgctattgtatctttgttgctccttaacagtctctctgttaagacctgacatagactgtctattatcccctaattgttggaacttgtttcttgtctcatctaggtttttttgtacatttttaatttggtcatttatggcagaaataccaccaaaatcacccttacttgcctgaactgattttaaactttgaagctgtctttctagctctttagatagtctaatcatttcctgcattgctttaacgttggtatctatatccttttgagagctgtggaagtagttatctttcccttttttgtttagcccatcaatggtgtccataagttctacaattttattcagtttctcagtagcactaccaatgtcggcatctactccaaaacgatacatattttcttccaaagtttcactccctttcaaaggggctttacgcccctagtttttaaatatagaaatcatcgtccctgctaggtgtaatagtctcaggtgcaaaattttcgtctccaccttcgaatattgaaatagcctcgtcaatactttcctgagtgattttaccgtaacctagttgttgagcttggttttcttcactgatttcaatatcagttttatcgccccacttgttaattccatctgcttcaagagctttagcttctttaatcacacggtctaagttatttttcatcatttcatttaagttatcttctgctatagttgttccaccgttagctacaatactttcagcctctacactagcatcccaacgagctcttagtttagccatatcttcaggagttgtcatagcttgaacttggttagcaatatcagcttcatcatggtcttcacgtttagccacaaagtcatcatggtctgctgtccaccatgagtcgtcaaagtcttggtagtctgaatcggctactccgcctcttcttgcacgttcaatttcttctctatctttctccatgctgtacgcaataaactcaatctgacggtctgtcagtgccctaaagtcagggtttgtaggtaataccttgaactctttcataatgttccaaagtaccctaccccccgtactacgggcaactcttcgggaaccacctatagattttaaatcaatactgaaatcggtctagccaatcggcaaaatcaactcctatcttgtaaataatattcatattatacacattttcaggttcgatttcttttggtacatcaataccacatacttgtaatagagcaaaagtatggtaaactacgtaggtaaatgtattaaccattgtacctgtaccacctaaaaagttttcacgaactgcgttaattttaccttgttcgattgcattaggtgctttgattttaactgtaatctttaacccaccataatcttcaaaattgtattcgtggacataaatgtcattaacccctcgaacgattttgtctaacgctgttttttcttcttctgactggtgatacttaattttgtttacttcctcatcagtcaatttttctccacggtcaagcttttcaaataaagctctaatctccgcattttggaatgtttcgttgttatccatttttatccccctagtttttatgttctcaatttataatatagtacttagttgtgagaagtacgctatttatatgctacaactctattataacacaaaaaaaccctgaggagtcctcagggatagaaagtcttagataacgctggtacctgcgttcttaccgttgttaacagatgcacttgttagatacgtaaactgagtactctcggtcacgatttcatttgccgtaaatgattcactgtaagatacggctgaacatccacgatatgctacaacaaccgcttttgctaagttgtccatcataacgatgtcgattacatcacgtaataggatgtcttcacctagagcagtaattcctaatgttgccaagtcttcttttttcattctcatacgttctaagttaatgtttccttcatacttcaagtaaacatgctcttgaggcatgatagaaccgatttcgtacacaccttgtgttccgtatgaacgctcaccactagctgactgtgctcgaccgatgattctgtttccaatcattaggtacacggtattaccagtgtggacggattgattaataacgctagccatttatgctttcactcctaattattatttttaaaactaaggggctgtacagcccctacagatattatgctgttaagatttgttgttggtaagtcattgtaacttcgattttgttaatacctctcactggtacaactgtgaatgagataaacactacgtctccgtcaataactacttgaacttcctcaggtgcataatttgtgatttcacgtacacgtttcttatcatctaagaatgattggataaagttcttgattagagaaggtgtcaattcaacagatttagttccgatgaagttattatccaatttaatttttaggtttgatactaagaagtcgtgaccctctcctacgctaatttcgtttttaacaggagcagttttatcgttataagtagtaataccttgtacgatacggaaacctgtaacatcgctgttacgaacgaactctaagctgataactccactttcgtttagttggtcaagctgagctccttctaagattacgtctaactggtcaatagcaaatggtttgaaggtaataggttctgcaacctcaacccctgaagccaatcctgccatttgagaagcaagcatatatcctgaaaggtttttaactcgtccgtcatccattctacggctacctgaagcacctactaaagctacacgttcactacgtaggttagttgctctagagattaattcttcgatagattctttaaatcctccaccaacgaatactctcataggctccccgttaactgttctatcttgtacaaaggcattagcttctgcatgaaccgcaggtttagctgttaatggtactaagtagtaaccaccttcgttagcaaatttcttgaatttgtttgcccaagactcaggaacagtaccgttacttcctcctgctaacttagttagtgggaagtttgtaacttctttttgagagtcaaaatcaaatgatacataaccattgtatgcagtttgtttttgaatatctcctgctagagctgtgatgaaaacatcttttttgttcttgatgtctacagcatctagtttttcgaatgtatctgttggtaagtttttgtctccgatagggaagaacttagctgtgaagtcaggtaagttgttaatgtcactaataaggatattagtatctgcataaacccctgtacccaagtcataaattttttcgaatgttactgttccacccgctttaggagctacagtattatcttttcctacttcggcatctccaattgcttttccttcaacacttgctaattcagaacctgcacgtagtataagctgtgaagctttacctgttgttgaatctagctcgatactcattgttgcttctgcttcctcaccttgatattctacagagaatactttccctaggttatcaaatgtttggctgtatctgtctttagagaacgcaattgtcaaacgtttagttcctgttaaggtattatcttctaacgctacttgaatatcattagaatctaaaccataaatttctgagttgacggtcattgcacctacggttaatttagcattttcagcatcttcaacacgcatagctaagatgtcacctgcattgttaagccctgtgtttgttgatgggttccatgctaactcaatcgcatctaatagttctcctccacggaaaacttgtttagcttgcatatagttacgcactcggtaaactgtatttggtttcccaccttcagcagaccctacaagcattaatactttaacggaaccgcttgaagctccaccgataccacttgtatctgttttaatctctgtatgaggtctagatacttttttgattgggtataattctactgccattttttagtctcctattcctaaatatttttttaaatatggtacaaaagcttcgtcacctttttggtagtggttacctgccatgtaagctctaaaaccttgtacttgaacctcactcattgtaaacagtattctcgctgtatcaaggaatgtgtctatatgaacatactgaagtgttttttcttcagttggttgctcctttttactctttgccatctttcattgtcctcctaaaaataatctctttgatactattggctacgttgtgttcaacaaagtaggatgaagtataagttaacgttacggttcttcccataactctagtctctccgtcatttataacaggagctaatgcagaaaatctagtcttttgtaaactatagtaattctgttcttggtcagattgtcgtaacataattaatatcacttttagaattgcatctaagcatctaacagtatctgtattattacttaaagaagtaatacttacactttcacttgctgtgaaccctcgataagttccgtgtgggtcttctccatccgtagcggggtatttagatgagtatttgatatttattgctctatcaagtaaaatctcattacccatgagagcaaagtataacctgttaccctcaatcttaagattatcggactctgcaaaggcaacatcactactactgatatactcccctatctcttcagaagcttcaacataaagtctatttttatcaactttaacctctaagtcctcacttaggtaacctttttctttatttataaaggttccttcaacaccacctaaagaatttttactctctagtccatcacctagctgtattacataagaggcaaggtatggtgttttaatgtcagggaagctatatcgtacagtaacttcgtttttatccttactgtctccacagtatgctgtcttaaaagttttaacaacctcagggtcgaagtctcttaaaacttcatctataatatagcactcgtgtaagataatgtctaacatgtttgtaacttcttttttaagatgcgtgtcgatacttggtaccatttcaatcccccttacaagttattaagtttccatttcataagtcgttccatatttgctaacaatgtcttacttaaatcattttcgttagcttttcctcggttaactatccaactattcgcaggagaatcttggttaactgttctaaaagcaatatactctcttctagtacctgaaccccattttttatctattgcagttacattatttgacctaggtttatagttcaatgatggtaccgcagaactctcttgtcttctatcatacaaatagtttgtgtacagcttagtcttagctcctgcaacctgtggtgtaggttgggctctaagttcatcgtaagctcttcgagacatgtctcttgtttttatactaattggtacgtacatataccatttaccttctttgttaatctttctattaggagatttagcaaagtagggctttaagtctataataccttgattagccatccgttgttctgttacttctaaatacttaggcatccgcttaacttgcataccttgctcagaggcatagttagccccctcttgcaaggtatcctctataacagcttcagttaagtttctcaagacctgttctgtattagtaaacaaattaggtcgtatactcataattacctcctatatcttaccgaagaatcctgagttgtttgtcggttttctcttagcccccattaagttttctgactcttcatccttaacaacctctttcgtgttactttctaatgaaaatggttcagggttaataaagatgtcttctcttttaagtaagagctttcttggcaactcttcaaagatagcgttatcacgacctctattcttagccgtgtattggtatctactctcttttaataagtctattactatatatcttaacacagtttcaatgtttaaagacacattggtgtttagtaagtgtttctttggatagaaaatattcttttgatagtccatcacaaagtcttcaccctcagtcaaggtaacaccattttctccctgtaactgacctcttgccatcgttatctgcttgacatcatagtataaatatacacctttttctagtcttctttcatttatatcaaaaatcatagattggtatatcttaacatcaggcacggttaatctatctctaaacgagattggctcatttaagaaactagtaccaatcgcagttcctgagtcgtatagacctaagtccatagatactatacctttttcttggctttgaatagctaccgcagtttttaccgcagggtcatatgcgactcctttacctaaacaaatagggcatgatgggtcaggttgtagggtttctttatgtctacatgtacaataccatgaacgctcccataagacatcaatacctctatcttcgacaaacttacgcatactgactgtatcaaattcaagccttgccccactagtttgtttagcgggggcttggctctcaggttgcttttcgaatcttgttggtttttccactagaatacctccgttatactacgttgaatgacattccgaagtacgattttaggttggcttctaagtcagcaatatcttctttgattaaaagaatatcggcggctgaacctgaatacatcgctgattgggttgtttgaaccgtttcagatataccgtcaatacttaaagtacgtcctgcaatacctgcaccgatgattaaacgaccccattgttggaatacttcaactagtgcgtatttaagtactaattgctctaagtcagcaggtacttcccattcattgctgactcctgcacgctctctaggtaacaatcctgctacataatctacgtgtatcatctgtggcgcaaatgtttgctgatttcctacaacaggtaaccctgcatacataggcataccataaacaccgatgtcataacccataccgcccattgcggattgcattaatgcagttggcataacttcaatatgccctgctaacccgtatactctccaccattcacggttatagttatatatctgtctaccactcatctctaaagtaaagttatctacgtagagaataggtcttttatacgtatgagtatacatataagagttgaagtctgctgaatagtagtcatgatgctcgttctgaatgaatctagggagtatcgcaatgtctagttccttttcagctttagctacagctacttcaaggtaatgttgataataggtgtcactcatctcttgacccgtttcagggtctcttacaggaacaccaaacatgtagcttttaagagcctcaggagtccaaccatagtcagctaaggtatatttacctacatcctcaggtttaactcttaaagggttaccatgtgtccctattggttgttgattcatcatgttatcacccttataaattattttttagttgtttcttttttagcaggagtttttttaacaggtgctttcttagcaggtgcctttttaacgtcctcaggagcctctacaggagcttcttctttttcaggtgtatttaccttatcttcctctttaggcttctcaggggcttgttttttgtcctctacgtagctgtatgagataaccttactagcaagttctttttggtgtgcttcggataagtcattactttctccctgagcgttaaatactacaactccataaggggttgctactgtctttcctgataataggtaatttactaacattatattttttcctccataaaagtttaatttattttttaaaaaaaatagggaatagcctctgaccattccctattaaattctttattcaattttccccttaagtgtttatgcttaaggtttaatttcgttgaatacgttgtctgtagcgatgtacgcaacgtttttgatacgaacccatttcttaggagcacgtagggctaatgcaccataccatagaactgcgaaggtatcagtagcgttagtacgagccaatggtaatcttaacattggaagtaactcgaacaagttaacaactgttgagctcatttctcccatgaagatgtccgctgtttctacgatgttttcgttcacatctacatactcaatcttgaagttaactgctttagaagcaggaatacgttcgattaagtagaattggtttgtatctaaacctttacggaagatagaaactgattgtggacgttgtgcatacatagatgttaaatcaatttctaatttaactccgtctgtagcgttagcaacagttgcagtaacaatgtcagaaggtgctgatttagctccgttagcattaactactacacggtattctagcaagcctttgtcgatttcttgtttacggaattttccacctttagctgtttctactgtagcagtaactttagcagggtgtggagcgttttgacgtaatggttcgtatgggttcaagatgttgtctaactccattactgtagaaccgtgtaaacggatatatccacgagctgagttaaatccttgaacgttataaccagtagttacattttgtccgttgttttgcattacttgaacttgtcgtcctagtaaagtgtttacgaagtctgcgtgtacaccgattggcatataagcatctgtagggcgaccaaaacctttagcaacaattactgaagctttgtttagggcttcctctgttaatttttctcctcgtaagtctaacacgttatctttgtcgataagtttagccaaaccgttgaactctaaacctgtatcaggttgagtatcatctgataaatctccatctccatagaatgatgcccactcaatagttttcgcaattgtagccactgcatcctcagtaaggatttccaatgggtcttcaatgttgttaaccaatgttgtagcaattgagatgtttttagtatctgatagatacttcatgtttactgttctttgacggattgatgggtcattaacttcagatacaccaatttcgtttgtgaacaatgcagaacctacacgtccgtgtgctaagtacacatcgtatttaacaactgttgattgaacaggagtacgtgttacgtctctatagaaagataaatcctcctgagtccaagtttgcataactaagtctgattgtaagaactcacgtcttaaagctcctgcatctaattgagtttcaggagtaataccgtaaccagttgtaaaacctttaacagcttgctcttgagcatcagatagcttagcagacttttcaactttgcttacatctactgtatttttttcgttttccatttaagcttattcacctttcattcgtttatatctcctaataaagagctaacctagcggaggcactagggggattgttagctctcatttaattctctgtctataatatagcactcacttctaaaaagtgtcagtaattagtagaaaaactaattattttccgttcaagaagttgttcaagcgctcagtgtccgttgatgttgcacggtcattgatataacgttgccaagatttagtgatttcacgtagtgcattttcatctcgtgcactagctacgctcttgcttgcttcttcaaatttagatttgaacattgtttcaacttctcccattgtcggtgcagttacaggagcgctgtctacattatgagctgatttttctaagtcttcgaagtcatcgtcaatagtgctagatttctccatataacctacagctttgccctcaggttctgcttctacagcatcgacagatttcatagtagcttcctgaataggtgttactttcatgctatccaaagatttactaattgtttcttgtgaacctttgattgcagtaagctcagttgttaatgttgctacttgtgctgataattgagagtatgatttaagtactacattcaaaagaccttcaacatcgaagtctgcggatttctctgctttttcctctttgtcttctttgtcttcttcatcagacttttcagcttcgtcttctttagcatcctctttatctgattttgctacagatttctctgcttcctcgtcatcctctttgtctgatttttcagcttcgtcttcagatttttctgcttcatcctctgatttttcagcttcttctttgtcagacttttctgcttcgtcctcagtagctttttcagatttctctgtatctgtatcttctacagctttttcagctttttcagtttctacagctttttcagtatcttctgatttagctacttcagcttccttagcagactttaatagttcttcgtttttttcgatttcttcgtcaaaacttttgataatgtcttttgccactatgtttaacccctttccttatttaaaaaatctgttgcttgttgcttagatatacctctacttagttgtaaaagtattgttgctacctgtttatctacctgctcattttcagctaggtatttactaacatcgtcccaagttttatcaatcaactcagaatcggtaatagcataaacatgactaagtgtcgtgatagctcctacaatctcttcttttctaagtgctcctgcatttgtttgtgtctcaggtgaagttccatgtcctgttgtccatgacttaactagagtttcccaagttgcatgaggatttgcaggatgtgttgttaaggctacgttacgaacaacaagactagtgattactcggtcatcttgtgtatctctgctaacaatagcaccctcgatagaaaaacctaagcacctatcatctcctgatttcttaatactgtgtgctagtttccacatagctttagcataagaattatctgcatatagttttgcctctacgaataaacctttttcaaagtctacataacagttctctgtaggagcacctataataaattccgcatcttgtttatgttcgtaatttatccatccatactctttaaaataagaaatgtcaattccgttaggactaactatatcgttttgcaaatctaaatcaggtgttgaggcaaatccttgcacataccaacccttaccgtcttctgcggtctcagactttttgaatgagttttcaaggtcgataggaacaaacacattaacctttcgttccattaaagcttccatcttatatcttaccacctgcctatgatgttgtttaggtggtacattatcattataccacatctgactataatatagcacaaagttgttaaagcatttactttgtgctataatttagatttatgcttttcctgaattagcatttggggcattcttactttgaccgtctttaccgacctctttattataagaaccctttccattaacattatcagtatttcctgctaacccgccttgaccttcttgaacatcttggaatgaaactgcatcttcatcaacatctgagctgaactcagggttcgatacattatccaatatccgtgaaagcttagcttgttggtcttgtttttcaacattacgttgttgaattgcttgacctttagattgtacaaatacaccatccaagataatatctccaccttcgatagggtctttaccttctaatgcacgagattcgttaatagtcatgttaatcttaactttctcttttaagatttctagtttttctaactcagtctctgtatctccaccaacaaacacgaacatgtattcgtcaccaaactcatcaacaacaaatctattgattgtatcagcaataaactctaacaaaggcattaaacctttattttgagatgcttggtttttctgtttggagttaccttcgttaagagaaccacccttactacttgatacccctccgttgttagggaagtttatttcagcagggtcaataacaaataccgcacaaattacattgataaggtatgttaaccacttttcaaactccatgtctctagcagaaggtgtcatatttacaaatttcacatcttcagcagagataactggtatctgccatgaaccattgatacctgataatgaactcttccactcacgtctaaaaatatctaacgcttgttgagattgattctgtcctaccttgaggtgtagtacccctcttgtagttcccccatgtgaaaagaatctatcattaaatatctcagtgttctcttgtgcaataaactgtttaagtgcaatttctgtttctgagaatccataccctgcaacttcaatatctgaacgagggttacgaacagcaaatgccatttcttttgcttgaaacttagctacaactcttcggtctataacctgtacgtatcgttctccatttttaatcaatttacctcttccatctgtagcaaagaaaatagttgatgggtctaccattgtaaatcgtttaaatttacctctacggtcaaataccttctcaaagtttacttggtcatatacataagtgtcacgaacgaattttttgacaaatgttaagaatgaatctctagtaacatctttcgtatctcctgtattatttaagaagtcctcaatctcacgcattgtttcttgttgttctttagtcggttctaaatcagaatctttcaacctaatctcataacctaaacctttatctgaatatcgtacaggtttacaatataaagatacttggttagaacgtatattaataattgagttcaagataatattcttgctaaacctctttaatactgtatgcagttcttgagagtttctaatagaaggtttaatcttgaaatatggattcatactcattgagtcaatcaaaggttcagagtatgccacctctttacctgacaagcctttctgaaccatttcacggctagctttagcttttctaatagctacttggtaattatctcctgcatctattacggtagtcggttcactgctatattcctcaatacctaccattcttgctttttcaaaccaatttgccaaacgttcacaccacctttacttttatgatattatttccttggtacgttaagctttgtgggatagtcaattctaaggtctcataattgtctacttttttataaaaaaataactttttgctttctaagacatcattatagtctgcaatgtgtaacttagacctactgtctattaaaagaacagactcatcatctagaacatgcaaaatttctctttgtttgtctgctatgatagaatgaaccattgctctatgtcctccgagactgtgatagtattctactatttcaacccaattgttagccattccgttagccttagctacttgtttagcttcaacccacagctcatctgttacatatgccatgtatcctactcctttatttcttttctttgtccaatatacccgaatacacaactagctaaatagataactagtatcttagctgttatgcctatttcagaaggtctactgtagatacctgcgagttcttggaatatggggcttgccatgtctctaaatataataaacatgcaaactatgcctaatactattataccacattttactccaaaaaatttatcaggtttcttctcaataccaagtatcaagatgtaagacacaataaaatatgttagcatcccacataacgctaacatcattgtcactggtaacatattaacaccctcctaaatacccatatataaataatatagcacaaaaaagtagacctcttttgaaggtctactctctaaggtttttattctattaccatccaccagtagtaggtacgttagaccaaccaccataacgttcgttagcgtagatgtctgccatacggtcttggttagcaggtgagaaatcacttgcatctaaaccatgacgtgaagcaatgctgttccatgtacttggggcaaactgatatgctcctaagtatccattacctgtaaaggtattatagttgtttgttgattcaaccatacgtctattagctttatgccagttatcgtctgaagctactacagtagattctacagcttgagcttgttctacaggttgtgattgttctacaactgcttcttgaactggttctgtcgctacaggttgctcagcaactgcaacagtaactgccgttccgtatgtttctagtttattaacatcgaagtctttaccacccactagtagtttttgacctccgaagattaagtctgcatgttcaatagtatctgtgttgttaccatgaattgcttcaaaattcactccgtatttatctgcgattttagatagagtgtcccctgactcgactacataataagtgttgtcgttttccttaacttcctctgcttttgctgttgtcgttcctagtgctaagactccaatcgtgctagctaatactaatgctccaatagcttttttcatcataagttatttttccaccttttcttatttttggtttgtcttgtcgtgatgacatatcttaatatagcagttagatgttacacacgtagggtatttgtgtaacaacaacattaagtaatatttcataaatattacagcaaacaaaaaaagagggtcataaaccctctctaatgcttaactaaagctaccccaatagtctacacgtttaccgtttttagcgttacctgtagccatgtatccgtagccattacctcttggttgacgaatccaaacatatttgctgtcaatcatgtaagcattgtacttaatagcttgacctgctccaatgtttgcgattaaagctccattacctgaagcgttaactgtcaatggtagtgtcatttttggaacaaatgtcccgttttccgcaatccatttacctgtgttgcttggggcaggtgcgggtgcaggtttattccctgcgttataacctccaacaatatcttgagaaagtacccaacctaatggaactcctttgttagtaattagatattcacgattagagtttgagtatttgatggctctttcttctttaactgcgaaagtgctaccttttacccaatcagaaatcttagcacctttactacttgggctgtaatgtgtagcatgtttagctatagttacagtttttttagcaggtgtaggatttggtgttggcttcggtgttggattcccaccagtaccgacaccgtttgctaagtctttagcaaattgtgcttgtgacacaccccatttagttaagtaagggattgggtcgatatggtctgagccgttgtttggttggttatgtgtgcaatagttatgtgttttaatacctgctaaggcacttgaatccaaggttaatgggattccaccttgtttagctaagtctcttagtaactccacataaatcttgtagtcacgttcaaactctgcttttgatttgtgtgactcaatcaattcaacacttgcataaccttcagcattccatccgccaccaacatcatatgctccacgatttacattagcagtttgaataacgataccgttacctaccacatgtgtgtagaaaccatcattgatatttttacgacccatgtaatctgcttcattctgagctgttgagtttgggttacccgtactgtgtgcgtgaacttgtctataaggtgttacacctacttgaggaagtcctgcacggatttgtttttttacagtataactcactttgttgtcctccttattattttctttgcctgttgcgatagtgtcccattcgtataatctatgttcttcgataatattaattatctttgtagcgtagttagggtcagttgcataaccataagtagctacaggtggtaatatagcgtgaactgcttttttataatcagtctctccaataaggtgtttatagttgtttttcctaaaatcactctctgtaaagaagtttccgtggtcagttacactatctgcccaactcttgtattttctaaagttagcatctattgtcacccaagaaccattcaaaaattcttttgtgggtactctgtaaacttcacccttccaatcaccactagctttaacaccaaacaaattgtttgcttctgtagctagagaactttctccccaaccactttctaaaactgcttgtgcaccgactagagaaggtagtattttaaaagttacccatgtgttctctgctcctgaacgtatcttgttcaagaagtcttgctgttttgtcattctagttaacgccccctaacatatttagtacatagaaacgacaaaaactcctatgctatcttaatatagcacaagagctttttagtttagatttccataatcttttttacaacatctatattcatagcttccttatactcaaagtcaagtaataaggttgtttcttttttacctgttttcgtactgataaactgttgccctttagataaagtcacaacaactcctgcttcaggggttctttttagtttacctgctttcttaagaaactcataagcttctgtaccttctgtagtagccaaactatttggcaaagccatctgaatatgcctatcaatctttctctcataaggattgatagcaattccaataagtccttgaactaaagagctctcatacgtaggtttattgatagcctctttagtaacaagcttgcttgtattaattggttccatcagtttcagccttttctttaagttctaaatgtttttcatagtagtctcttggcataaatacaatgttagccattaagtcatctgcttgggtaacaggtgaaatacctgtgcctacgacaatctctacatccccaagaggtaagaccttacctgatttgacagctttgtaaaataagtcgttaattttgctatcagttaaccctttactaacagctaatcggaataaatactcatactctacaggtacttgttctctagtaatggtaaatgacaagaaataacctgagttgtaatcaccatgtgtaggtgagattcgtaaaaatctaaacttctcataacgctctcttagtagatttgtaactacagctaagtagtcttcgtaatcttcatcgttatcgttctgaagcaccaagtcttccaagtttagcttgttatcctcaattttatatactgtttccccaatcacaaattcgtttaagttagtatcttttgtttccattttatgtcctcctgttattatatcactcatactgtgtattatgtctagcaactccctgctaggtagtgttttcttttctgtgtttataaggaatatcagaaatattgcataaactgctacagctatgcaaatgactataactgttatatccacaggtagcaaaaacattagaaatcccctactgcctgttttaactcctcaaaagttgcaactaggtatttacctttaagttgcatgttatactctagtgataacatatacaaagctttcacacctaaatcaggaaatttaattcctagtttattatctaaagctagtttaagtgtttcatacagggaagttaaccagtaaccccctactgtaccatcagatatgataaagtctacttgaataaatttacctaccttgctgatacctgttaaaaaccttaatattccattttcatctcgaccttctaaataatcagtagattcacttgaaaaatcctgactatcttcccaatcagttatttcactagatatatctaaaacctttttaggtgttgtttttgagtttaaatcaccaaaagaatagtctctagtaaggtcagaagctcttacaggttgttttccttctgaaggagtttccttatctaggtcattcccttctgaatcttcttcttttttatctttgtctacataaattttcattttagtaggtttaccatttctgactacggtttgttctactgctgttaacctagagaagtctttatttccacctttagaagtttgctctactgatagagaacctaaacacaactcataaaaatctttataaccaagttcctttactaagtaatcaaattctgaagataactctttattagcttttctaacagaatctaaatcttgtatatccatttttgctaaactagaaataaagtctactgacatgttaatattactagcaattatattttctgaagtttcaatgttcattagtaaatacctcctcattaatattatagcacaaaaacctcttaagtgaatttgttgactttgtttcctatttaaactttttgggtctcttattatctttttatatatatacccttttaataaacatatataaacttatataaacttacgaggggcgtgttgactttgtttcctatttaaactttttgagtctcttattatctttcttttatatactaattaaacccttatataaacttatataaacttacgaggggaaaaattgagaataaaaaaagaagccgactcgggctccttagatttggttatagtattctttgattttatctgttctgattttagcttcttcgtcagtttctttctcaggagccttatacagattttctatctcagttggtattggtaacccaacaggactataacgcacaatatggtcaatgttcacatagtcagattcagaatttctatctttacctagcttgacattaacaaagccatttcctgttcctgctttagcacttgctaatctagattcaggagtagtaactccacctctcttatcggcaaatacgtaagcttctgaaccatcagagattacgactttgattgcattttcgtttatactcatttttactagctaaccccttccttttgtggtatacttatagtatatcatattacttttgttttagcagactgaagatataagtgacagatgctcctaggattgccatgaagattttttctactaaatctttttttctgtctacttccttaacatcgtctcccttcatactctcaacagttttttctaactgtgtgatttgatagtacaagtgtgattgcttctcagcctgtattgcagtttctttatctagactttgaacgatagactttagctcatttatagcaatagacagttctctacgttcagcatctaggttaacaaagttcttatctgaagttaaagcacctgattgcactttttcttctagtgttgatattctacgaactaagtctgttgttgataaattttccatgtactatcctcctaattcatattggagttagaaaaactcgtaactttagtttgagtgggaaaattatctatcaaattctgaacaatggcttgtctatttttggttacaattgttccatagttttctcccgacctgatttcaaattctagtttcccatactcctttaagtcaatggtttttaaaatgtagctctcatggttcctctgttcaactttataattgtatgagaaacctacaagtgtggctgttgttgcacatcgacctatagcgtagatgtggaatactgttctgtcttgctgaaatttatcaatcatgtctaggaactcgaccttaagtaagtcttcgtattcaagctcagcactatctgttcgtggtgcttgactctttttgaaaggcatattgaacatggtattattcacccccttcagaaacgaaattagcaacagttacaagtataattattgctatactacaagtgataaatataaggtgtacatatcgcatagctaagagcattccgatactggacacgctcaagaagaacataacaccaatataaaaaacattggctacgattgatgatacttctccttgttgaagtgacagaactagtttaggcacaatcttactcgttgtccaatagcacaccagttgtatgagaaacacacataatattgcaatcgcaactaaactcataagttggcacacctcctagtaaagctatttataatatagtataagtggcgggaaaattatcctcagtaagatgtgtgctaaattaagtatatagagcatttttataaggaggatatgtatgaagttttttaatcgacatttagtattaaaatcattggtagttgtaacattcagtctatttgttttggttttagcttacttcggtggtgtatggttagaagttacaccccatgtagccttaacatacatgacaggcggtataattgcctcatggtcagcatctactatgtatgaccgtattgtgatgaaaaaggttgataggcaggtttacaagaacgtagcttctcaatcagaagacatcagcaagttaaaaaatgatgtgagggagttgcaggaattaaatggcacacacaaaagaccttacacgagaagagattaaagagaacagaagtgctataatgcgttctgctactagtgttaacaagatatatgtgggagacaagcgtatcacaggtgttagaatctgcggagtttgtcatagaaacttaacaagttttgttcctgataactgcactacttcagtggtatgcaaccatttaagctgtagactatcaagtattgccactgtgaacatctgtgcagatatacgttcttgctatgcaaatataggggcggaggaggaaaataatgagtaatactgctgacaacataagaaaaaagcttgaaaagaaaaaggctcctaaatctagtagtgaagagcttttagacacaataaatgaagcaagtactttgttagttaagaagttcttggcaaatgtccaatcaggctctgtagagcttactgacgtacctgatttggttcgggttattagtatggcaggagaccttaacagttggtctaacggcaatacaggaggcacaggagcaccacctgctgtaagtttaaaacagtctgagatactagaccgagcattaactcctaagacagaacttgtagatggagaagaaaaagaggttattgacctttctgaactcgaagcgctacccgatgaagatatagaaaaacttctacgagaaagagagataggttataaccaagaaaatgaggcgaccttttaaatgacaaatagagagctagggtctcatctagctaacatggctcgacaaacctttggtacagatacaccaaccaaagaccagttgagctatttgttagaccagatgcaaccatcaacgtatttattaaagaatcacacggtgcgtagtcacccgataacttttgctatatcaggaagaaatcaagaaaaagcccaagcacacagaccttggcaagtacaaattataaatgacactcatagaactcgggcaattatcaagtcacgtcagctcggactttctgaaatgggtgttggtaacttaatccattttgcagacacgcatagttacgatgcagttaaatgtctgtatacgttccccacacacagtcagatgaaaaagtttgtacagactcgtttagaccctgtgttagagcgtgggtactatagtactattgttgaccctaaaattaattcccttgaagctaagaagataagaaatagtttcttatatttccgtacaagttcaaaacctagtgcggtagagggtgtggatattgactatttatcaatggatgagtatgaccgtgtaaacgcctttgctgaggcttctgctttggaatctatgtcaagttctaagtatcaaattgtgactaggtggagtactcctagtgcccctgatatgggaatccatagactatttgaccgttcagaccagtattggtatttacacaagtgtgaaaaatgtggacattacaacgagatgaagtatgacgaatatcaagccgaggctcctattgaacgtagggggaatattttatgtgtaaaccctaaaggtattgatgtggtagctaaaactgtagttgatggttccttccaattcgtatgccaaaaatgtggacaaccgttagatagatggtacaatggacattgggttcctaaattccctgaccgtactaaaggtggtctaggtactcgtggatacatgatttcacagatgaatgctgtttgggtaacggcagacagccttaaaagaaaagaactagagtccatatcgaaacaagcgttctataactatacacttgggtacccgtatgcagatacaaaattaatggtttctgccgatgatatttatagcaacaaacgctcttacctagagaaaccgttgtttaatcgaggggactacgcctttgtctctgtaggtatagattggggtaacatccattgggtaactattcatggggttaaacctaacggacaggtagatttaattcgtctgtttaatgttattaaacctgacgtggtagatgctcgtgctgtaggtgcagatgtagagaaaataattttagaattgaccccttacagacccgacattatagttgctgatattggggactcaggagaaaaattagctaaattgattgattactttggtcaagatgttgtatttggatgtaaatacccttcaacacctaaaagtacaggtcaagttaagccaacatggaacatcaacggaaatattgtttctgccgataagctaactcaaaataaacgatatattactaagcttaaagagggtcaaattggtgtttattcccaacgagaccgtgaacttgatttctatgtagaacattggaaaaatgtggtaattagagaccaagaggacgacaatagtgaaggtcagttttaccaaacgattactcgtaaaggtgatgaccactatgcccaagctagtgtatatgctatgttaggctatgaacgtttgttagatgttcactatggtatagattcctatggtttagactccgcttggataaacgaaactgtagctacacctacggatatatataaccaatacggaaattaaactttgttgtttcaaataaggaaaaagtgtggtataattaatttgtagaggaaataccagtccgtttcctctatagtttattagttcatgtgggctagggttcccccctagctcctccttatttgaaagattaataaactttgtattgacaatcatacaagtatgtgctatattataaatataaaataaaagaaaggtggttactaaccatgtataaactcaatgaagaacaacttaaaaatacaaatactgcggggcgtaacccctttattcaagataacccgtggggcacagtctgccctcacgctatctgttgacgtaagcttttttagctttcacaactagtcaacaggtagtactcaagggtgctacctatttttgtacccttttttaaagtcaacgataggaggtaagcatatgtctcgtagttataagcaccatcccgtatgtagtagccactcatctcttaaagaatacaagaaagtatataataggagattcagacgtaggcttaatagaggagagcttgatgatgcaacttttggtaaaagtaagtcttaccgaagaatagaaaatttttcttgggttgctgacaactataagttctaccatgatggttaccagtctagtaaatggtgggggtattacgaccctaaagtagaagaagaatatcaagactttatgaagtggtacgtccgtaagtaattgcggggtagtacccaagcggttaagggaactagcaaaggtgtttactctaaaactacttgtgctatattacaagtagaggagtgattttagtgagtaaaagtaaactatacgatataagtgacacagagtttaagaatattgtagctaatagcaccaccatgagtgaatgcgttgtgaatgtaactaaaattttaaaaagtcctgtgcatgtagatactgtgaaaagaagagttaaacaattagacctttctacggaacatttcttaactatgacccaaagagctacactattccacactttggatattgaggatgtgtttgttgaaaatagtacagtatccaatacaacagtacgaaataaggttatcgaaaatgacttaataccttacaattgtgctctttgtggttgtagctctgaatggaatgggcacccactaactttacaacttgaccatataaatggaaacaataaagacaataggcttgttaacctaaggtttctatgtcctaattgtcacagtcaaacaaaaacatgggggtctaagaatgtaaagttctctgcaaaagttaaaaagtctgataaagcgtgctcaatatgtggtaatattctaggtaagggtaatagctcagggcgttgtttaccttgtgctaacaagataaatggagctctcagagtacaagctacagtaagaccacctaaagagatattaactaaactattaaaggaaagtaattttcaagcagtagctaaagcttataaagtttcagatacaactgttagaaaatggtgtaagtattatagtatgagtactaatataaaagactataaataaaaccgttatcgtgggttcgaatcccacctatccctttaaaaatattttaaaaaaagtattgacacctacataaatacatgatattatagtttatgtagtaatcactactacctgtttttttttcatagagctaagataacacttagctctctcctaatggtcgtatagggcaaaggcagtcccaccaccttgtcacggtgtgaacatgcgggttcgactcccgttgcgaccgtaaaataaatgagctatcttatgagtgacttcttaagtaggactcaaatcctgactgattattaatagattatagtctaaacgtctattataggtgaaaaatgttggttttagtactcccaacaggacatacatagcgggttttgtatgtaaataacggaaagtagctcagtttggtagagtactgcatttgggatgcaggggtcgcaggttcaagtcctgtctttccgatagaggtaaacaacttacattgttgctgacaacccctatgacgggtctagtgaacgtgcatggaagctagataggaaaaactacctcaagagccttaatgttcggtttgcctgtggagactactgtgtaagcagtgagaacagggatttgttagatgtggctcgtcaataacctaatacatcacaatatggcgtggtagccaaactggtaaggcactcgactttctatcgggcgattgcgggttcgactcccgtccacgctattgtattgaatggagtataaaccataggtctgtctagggtagtgagaaaccaataaggcagtaaatacaaatgttttaaggagcttatgtgttcggaatctcactgcataagtgcaggctctgtatgttagaaggttcgattccttgtctagaacttagtggtctaagcagtaacatataccttataaaatattcctgatattattgatgcggtgtagagtactggtaactcgcaagcctcataagcttggatatgtgggttcaattcccaccaccgcaataaacatattacactatcagaaagttacgctttttcttgcttttaagaaagtagtatgctatagttaagtcaagccttagcaggttaagatacccaagaggaagcaagttgagggtatgtgtgtttactatatacgaaggttcctagttacctttcgtatatggctaatgaaaaactaggttcattgaggtgtagctcagttggtagagcgcacgactgttaatcgtgttgtcgcaggttcgagccctgtctcctcagttataggttcttggtgtaacggtagcataaacggctccaacccgtttggtgtgggttcgaatcctacagaatctgttagcttaataatttttaagtacaaaacacctataggagttaaccaatgatattattaactaagaattgcccatcatgcaactgcgattttgatatacctaagggtactaggggaggtaagaatagaatatattgctacacatgtctcccatcaggtttaagtaaacaggaacgcaagctcttaaatcaaaaactattatcaagagagcaagaacaatataaaattaaccgtggttgtgatatatgtgggtataaccgttgtgttaaagctttagaatggcatcataacgacccgaaaacaaagctaggagaccctagtgagatgcgctatagccgtaaaaagtatatgattgaaataggtaagtgttccttgttatgtgctaactgccatagagaggtagaagaaggcatagctaaaattaggagagatagctcagttggttagagcactagcctgaaaaactaggggtcgaaggttcaactccttctctctccataaattgaggcttactttacgaagtaagagcggagcatacccgcaggttggacatactacagttcccccgtgatgcttcatggggttactctcaggtagccaaactggtaaggcatcagactttgaatctgagtattggaggttcgaacccttccctgagaattaggtgcctagcaaagactgagttcccgaatgggagtaaggttatacactgttaaggaataaaatctttaagggtcactgtatctgagaaacctcatgtctttgtatttttaattaggaggtcaacaatgaaaatattcgtagatgacttacggttagcacccgaagtttatgataaagctttcacatcaggagaagacttcattcaatggttgtctgagaatcctaatacagaggtggagttactgtcattagaccatgacttaggtcaagacgtaatggacgggtatactttaacccgagagcttgttagtttagaaaataacataaaaaatgttcaattccatacagataatataatcggtttgaaaaatatgtactactacttgactaatgctaagaagcatggtatgctacctaatatggaaaacatatatggtcataaagtagagtgcattgatggtaaagaatctattgtaccttataaaatattctaggagggtaacatgaaaaagtatataacttcagattggcaccttgaccataataacatttgtggtgcagatggttttgtaagtacgagagagcaattcacttcagtagatgagatgaatgaacatatcatttctgctattaacagtgtggttaccaattccgatgaactatatcatcttggagatattgggatgaacaacaaacctaaaagagtatttgaactgctttgtcagataaaaggtcaaatacacctatttaaaggtaatcatgatggtagtaaagtcctaaagtatattaaaaatcataactttcaactacccgatgggcgagaaaagtttgttgtatatgaagttgggactattgttaagcgcaacggtgttcagtattatctaacgcactaccctatgggtttaggtgagtacagacgtaaaatgcgctccatttgcggacatatccatgaacaggaggctagggaagctaactgtattaacgtgggtattgactcccctgagttacctattgaccaaccctttgctgtacctcttgagctagatacagctatggatttagtggatacaaaatggaacaaatggtttgaacaagttagtaggttaacttctgattaacttactcatggaaagtcttgactattggtaggtctagctagtttgctaaactagtggcggttaaacgtctaggggttcaattcccctactttccttttgcttagttggtgtaactggatagcacactacgctacggacgtggtaatatgggttcgagtcctgtactgagcgttaggttgagtatacatgattttatagctattggtctaatcattatgaaagtaatgattctcgtgaccactgagtgtctatcaggagctataattaggcaatcatttcaaccttaaaaaaaaagtgttgacacatattaaattatgtgttatacttaattcataagttaacaaatgaataatcttgaatagttggtgtatggctttggtaacacaccgtaagagattacggagcaggcagttcaaatctgtcagtcaagacctttagtttttggttaatatcctttttcgagtaggttatcttgaaaaataaatctgcgcttgtagctcagttggttatccgaaaggtgtagagcatccgacttttaatcggagggtcacaggttcgaatcctgtcaggcgcatagcaatgtcgcaattactgtattctataggaagaaggcacatagcaaatggaacaagttatagcaacaatattaggtgtaggcttaacgatgagcccgctagttatgctactagtggaaacattaaaagcacctaatgtgattcctaatcgttggctctcttgggttagcgtaggcgttggtgtagtcttaagcatgtatatgggactattaatgcctgacttaggttcttccctagcacagctcgcactatcaggtgtcgtagcaggtactgtagctagtggtatctatgaccaagttaataaaggaaaagatgattcacaacctccccttgaccttagttaagggagacccgcccctttagttcagcgggagaacgctagtcgaacttgtgctatattatagttcgaataactaaagggagtgggtattattaaaaagttaaccttgtctgacaaagacttcataaaaatatttaacgagagtaactctatgcacgatttttataaacgtttaggttactcctcagggaaatctgtagctgtagacagaagaataactgagctagaattatctatgccaaaatatagcaataagaagcatcgaaaacctgagtctgaagttttcaccacaggaatttatgtggataattcttacttacgaagtaggtatttggaagactctaacatagattactgttgtattatgtgtggtaacacaggtgagtggctaggggttccaatacccttagagttagaccatataagcggagaccgtttagataatagaaaggttaatcttagatggttatgccctaactgtcattctactactcccacttatggagctaagaataaaaacagaggggtagctacaccaaaaagaaactatggtaaagctagttgcgcatactgcaataaagacttcactaagaaaactaagtatcagaagtattgctctacacactgtgcaaacaaatgccaatcaggtaaaccacctatagaaaaagaacaactatatgatttgcttaaaaaccataactttacgtatgtaggctctttatacggagtgtctgataatgcagttaggaagtggtgtgtgaagttaggaatacctgataaagcctctgcatacaggtagatgtcggtggttcgattccatcaaggggcattgtacaacacggagttttgtagctttctcctttgaaaaaatatagcaaacatcgcctagggttactgcgaaacgctgaccttaagtggtataggcttactaagtttgtaagcctcacgcccgtgtagctcagttggtagagcgcccgccttgtaagcggattgtcaggagttcgagtctcctcttgggcatagcaactgtaaaaagttgtgagcatagacatttctcctttaagtcagctcagtaaaatgggctgatatgtggacttagtataagggtagtatctttggcttccaaccaaagggtgcaggttcgactcctgtagtccatatattcgtgttacccaccgcctctgtaaatgcgaaccgagggtagcctatcaggtcatatgtagatgtcaagtatataaagctaaaagtatgaggtactttttgaagaaattacttgacaagccctgctaacatagtataagcactacctcataaaagacttgtactatgttagtatatacataaaataaactcaggaggaacccacaatgactgaaactaaacaagctaagaaagtatcaactaagaagaaagaactggttaaagagcctttactgcaacatatcgacttcactgaatatttatctaaaaatccacgtatgcgacctcgcaaacgtaagtcagtgaaaaaagcgagctaaactttggcactaagtgccttttgctctcgtagctcaattggatagagcagaacccttctaaggtaaaggttacaggttcgagtcctgtcgggagtgttaaagattactggaagttcttaagagcgtttgtggattgtgagatttgcgattacagtttgatacctaaggtaataacgtgcgcactactgatggtagaaatctttatttatgcaggtgtatcccaactggcagaggagtccgacttagaatcggttcagtgagggttcgaatccctccacctgtatcggttaaacatcttggaatagactgttaacctattgtcccaagttggcaagctatcatgaggctagccgtaaaataaaaaaaaatggacatacctttggtgtatataataagttaagggcgcatcctaaagcgattgcttaactagtatacataaggagatacttagcggtgtcaacaactcaagagtagaatttaggttgagagttaaggttcgttacatttcggcaggtactcaaacggtaaagagggtagtcttgaaaactactaggcggtaaaacgtgcgtgggttcgaatcccaccctgtcggtattttaagctctgtacaccgctctcggacgtgtataacttaagaccctttataatagtattgcatcatgagacctttcagggttaggaaaaggtaaattgtatctgtggtacatacccacctaccacaaactcataacggttggcgttggctttgttacgataggagctaggtttttcggtgacgtttttgtcctagaaataaaacgtacatattgtgtatctgaggtggttggtatactgaggatacgtgttactctacgggggcacgggtgtgtaagatacacaagttgggatattagctcagtgggagagcacctgccttgcaagtagggggtcatcggttcaaatccgatatgttccattaacctaagtggtagttactaaaccgcaacttcatcttttagttggtgcccgtaagttgtcactctgagaacagttgggacttaggttacaaggggtgtgtatgcaagatggataaagcaggcagactgtaaatctgttctctttagagttcgggggttcgaatccctctgcgcccattagagcggagccgtccgccgtgtaggaatttccttgtgaaaagaggtagaactattggtattctctgacggagagagcgtaggttcgattcctaccctacacataatagcactcaggtgcttaattttttaaggaggtagtcaacatggacaaacaaatcgaaaacatctttacgtatcatgcacccaaagaagggcaacctgagaagtatactgcattacgtgagaaagcaaaagaattagcttaccttattggttctgagtgccctgatagccgagaaaaatcattagctattaccaacttagaacaaactattatgtgggctaacgcaagcattgcacgaaactaataatttataggaggactgactatgaactttttaaaatatccatcgctaacaaatcattacgctttaggtaaagatagacgtattccgtatgtgtacgatgatgtatggtacgctactgagaaaattcatggagccaacatctctatcgtgacagccaaaggtactgaagaggttggtttggctaaacgtagcggatttcttactttagatgacaaacaatttggtgggtttaaaacatgggtttctgaacaaggagctgaactggtaaactcactaaataaatttttagattgggaaggtgtcacacaagttcatgcctttggggaatactttggaggaaaagttcaacgtatggactacgagttgtgcaagcaagggcaagtagacgttaaattatttaacgtaatcttggaatacgatggtggtacaattcattatgttgttagtcgtgacatgatggagaaatatatccctgctaagtatttaacacctgtctcaaacaagaaaactttacgggaactagttaatggacacttagaagtgcaatctatctacggcggcattagtgagggtcaagtatatcagcctactaaaggatatgtacttaatgacatcttccgattttatggtattaaacataagacaaaagagtttgcggaagttactaagagtacagttaaggttaaggaaaaggttcaatactctcctgagttcttagctcttgttgaagatgtatctcgttatattacggatagtcgtttaaacaatgtgttatctcatggtgaccttgagttggagaacaaaaacattggagctatcatgattgctcttaagcaagatattgtgaaagagtatctagctgaggttgtaacaacgcattcagataccgatgtgctttccgcagtaaacaaacacaatggtgctattgcattattgattaaagaagctattacaaaagaaagtaatgaaatgcttggaaaaatttaaaaattaattcaaaaaagtgttgacaaactttctaatacatgataatatgtatatatagacaagggggaaccactatgaaatttaatttttatactcaagcaagattaactactcctactgagtggggtaatcatgaacgtcacttcactcataaaggagtaaccaactttaacagtgggcacccttttgaatatctcatgttcttacagtcctttgcggaggcgctaggctccttaggtggaggtttagttgaactagaacctcatattttaggtgttgtagatactacaaatgaaataatagcactagtcgagttatcatagctcgattacggacatgtagctcactaggtagagcaccccgctcataacggggcggtagcaggttcgaaacctgccttgtccatagtactgctagtcatatgctgttcgacaaagaattttcgagggtttactatatcatgcagacaatgtaaactttgggaaacagacccctcatgcagaaacgggctgtagtaaataactagtagtgcacctcttgggggtatagctcagttggtagagcaatgtgttgataacgcataggtcggtggttcaagtccatctgcccctattgacctagaaaaagtctgatagcaatggtcacgttctgtgtgttgaggggtgaatacactatcttggttgttgtaagagtaaacgacataagtgcctctactctaagcgcttaggtggaggtcaatcatccctgtggaagccaaactggttgaggcatacgtctgtggaacgtagtaaacgggttcgagacccgtccactggatttgaaaagattgactggtcttggtgactaattggggaggacatagcccctaattgcgaagggttcgaatccctcaatctttttagccgagaggcaaataaaagacagataggaagatagatatgatattacaagtagacaaaacaaaagatgtacctgaaggagtacctaccgttctgaagtcagattttattgacaatgttgttagaacaacacatacagaaagaggagttaaacttcacttagttaatgatgttgtcttgacactagaaaaggatatggggggtagggttgtcttatacaactaccttgaggactatatgggatactctattagccaagcatggttgttaaacgatgcaggtaagaccctaaagagattgatttaaaaaatcatgctccttaattggtcgggatggagacctaaacaaaaacccatttcatttacgtaggggagtgcatgtcactcctactatttacggggcagttcttggtatcgactatctattgagggcttcaagttcaagtagcagacgtgcttaaacgtaaactaaacataactgcaaacaacgaattattagctgtagcctagtttaggctcagtacacgtatactaaggggatatgagcctgcggaagctccttagtcaaaaagaggcaggatacactaacacataaccttgtacgtgttgggagagcaaacaaggtggggcatactctagtaagcataacgcacgcatacctagctagaggttccaagtaaaaattacggtatgcaaaaaacttgtagaagacttggagaagtaagtaggtaacacaggggttcgactcccctctgctccatacatggctttggactatcaggcaatgaacatttttctagataaggtgtttatcctttggtggtagtacttgtgcacaggtttgggttcaattcccaacaaagcccttataattagtatctaggaggatgaaaatgtcaatattaactactaatttcttgagattaaaaaacgcacaagacaatatcaatgcagttaaagaatcaggtggtactgtaaaagatatttcagatggataccacacgtttgatgaactatattttcatagaatggttctctctagtatagtgtttaacgaacataaagatgttgcttggaaagctaaaaaacatcacgatggtacaatgtttggtgatgacgacatgtttattgtaggggttgaaacccccgaaggtcagtatagctaccactataagctagagcattgggatttattcgatgttcccgagctagaatatgcccctgaatatgatgggcatacacctagtgacatcggtaggctattctctttataggaggttgctatggtagacgaattacttaagttatctttagaggagcttgaagagcttaatgctcaattaacaaaagaactattaccttatcacccattattaatggctatgatgaggtaatcatgcgggtgtggcggaactggtatacgctcaggtcttaaaaacctgtgtcctttgtgacatgtgggttcgaatcccaccacctgtatacggattgaccatcctttattatctgtcactactgcctattcgaagaggtctagtcgcagacggtatcaatagaaggtgaaatgacaccaaagcttattagaagcactcctcgaacttagcacgaagacggggagataggtcagggttgctgtgctaagcagtccttacattaggttaaaaagaggtactgtgctcggggtgtatgacatgcccgaggggttcccaacctctgtagcttagtctcttggtagagatgttcctagctagaacagcgtgtaggttcgattcccgcctaagttgtaaacttttaacaaaaaaagtttaaaaaagtattgacagcagattatatacatgctatactaagtatgtaatcaaataacaaatacaaaggagaataaacatgaaagctaatggactattacaaaaaggattgcaacgcagacaatatcagaactatgtatggggaattatctcctcaaaggggcgttctgctcatcctaaatcacatatctacttaagtcaagcacataaaactaaaaaattagcataaagtacttgacaggttataaaaactatgttatagttaacttataggaggatgatacacatggcaaaagaattttacggtgtagttgaaacttcaactacagttaaggaaaaatatacaactaaaaacaagcgaggtaaagaggtagttaaaacacgtaacgtgactgtacctaagtcgatgcttgttaagacaggtgaaagtactcgtgtacgagctatgcaagttctagaatctgtagctaagaaaaacaacggcactgtttctgtaacaggagtattttaataataaaaaatctaacagcaactacgcatattaaaggaaatcttgttatcgagggttcgaatccctcctctgccacaagcagagtagccaagtggtaaggcacgagaaaaataatatatagatttttgtaaatactcttgacaaaacacacaaacatgtggtataattaaattataaagaagcctacagcaatcacgcaaaaaatctaatactgaagactagactatgactgcgcttcttgtttaaactgaaaaaagcaatataaagaacgacactgcaaacttacgaaaaaaactataaaacttacagatgaagataagaggagctacagggactgacctattaccctgtagtcacaaataaggtcagcgtaacggttttataggtaaatccttgtaggacgtgaaactacaataaaaatctaaatctcgttcttgtgcttttaatatttgaaacaaatctttataaataaagaacccaatctttataaataaagaacccaacagcaattaaactattccatcaggaggacgtggcgcaggttcgattcctgactcccctattaccctaagggtacgatacaaactactatttcaggggagtagtgtagtggtagcacacgtaagtagcggttcttgtagcaattatttatcaatttaaaaataaagagactcacagcaaatactataatagcctgttaagctcggggtcgcaggttcgagtcctgcctagggacgttatgtccttggtagctcagttggtagagcacgtatataaatgtctcttgtagcaattataactaaatagaaataaagaagctcacagcaaacaactaacatacaactttgacttccactcaaaaggtgtgggttcgaatcccacctatcctcacgagggtagtggtgtaatggtagcatacgtataacagcttcttgtgatattatgactttatttaagtatgtctatcacaatgatatggcatactttttttattaaaaaatacctttaggagggtgaaaacatgactaattttttagatgctttaaagcaggacacaacagaaacacacacagaaaacggagctttgacgtacagttcaaccctgaacagtaacttagacttctttgctcaagcaggggctatgcgtactcgtttagctgaagtacctagtttatttctagatgcgtattctgaggacaaagagctagctcttcgtaacttagtgcatctacggaacattcgtttaggtggtttaggtgagcgtgatgccttcagaaattcattcgatgcgttagctgacaatgataaagaagttgcagaaaagtttgtagattatatcgctttcatcggtcgttgggatgatgttgtatcagcttatcaacacgctgttaaaacaaataacacggtcgttcgtaaagctactgtggctgtaatcaaagaaacattaacagaagatatgttagcccttgaaaaaggtaaacctgtatctctgttagctaaatggttgccaagcccatctacagcaaacaaagaacgtagaaacgtaggtttccgccttatggaagacctaggtatcaagtatagtgataaaggtagctatcgtagaactttaagttcactacgtaaagaaatcggaatcgtagagcaaaaacttgcatctaaagactacgataacattgagtttgagaaattgccttcaaaagcattattcaaatatcgtgaagctttccgtagacatactcctgaacgataccaacgattcttagaccgtgtagaagcgggagaagttaagatgaatgcgaagaacttgttaccatacgagattattcgagcttatcaacttaacggttggcatacaccgaacgtagaccaagttttagagttatcttggaagtctctagacaatgttctagaaggtatcgaagacaacgctattgttatggcagacgtatcaggttcaatgtcaggaaaccctatggatgtatctgtatcgttagctttatattgtgcagaacgtttgaaaggtgcttataaagaccatttcattacattctcaggaaacccaagcttggttcatgtaccatcgaatcaaacattgcgtgaccgtgctcgtaaagcttaccatgctgattgggatatgagtacaaaccttgaaaaagcatttgacttaatcttaagaacagcagttaaacatagcatgaaacaagaagacttaccaagtaagttaatcatcgtttctgatatggaatttaaccgttgtatgcgtggtgcagacattactaacttcgaaaatgcgaaagcaaaattcgaacgtgcagggtacaagttgcctgacgtggtgttttggaacgtagacagtcgtcaaaacaacacaccagttcgtcatgacgaacgaggagtagcgctagtatcaggtttaactccaaacatcttccgtcaagtattaggtgcagacatcgtttcacctgaagctatgatgctagaggttctaaacagcgagaagtatgacttcgttaaaagttgtttataaaaattagaccttcgggtcttttttttataattatgtgttgacttatttaggtattcgtgttatacttattttgtaaaggaaaggagctaagaatatggagaagttgtctttcattgaatcactagtgcactcgacactattcaatcctaaagcggactatgcttcaagtgataactggaatattgagctcatctatgatatgattaatacagaagagtatcaggatgtcctagatttacaagtaatacataagcagtgggatgaaagtgcagagtttgaggactgtttattcggtgagttggctatgttggatgaagatttttctatgggaacgtatcaagatactatagctgaactatcttcatttggtatacctattttggaaggggagtatactgtagtaattcaggcacaccctatatttcgagtagagctaccttattgggagtttgaaggtgatagttggatagagctatctaacgttagatggtacatcttaggctatgacaagaacaataatacttatgttaagatggggggtaaatttgatgactgaacatttgcggttaaaagagtatagagaaaaacgaaatctatctctgcgagatttagcaagggaattggatgtaaatttctctacgctatcttattgggaatcagggacaaaagttcctaaggcaaagaataaaatgaaattagcacaattctttggtgtaagtgccgatgagctattaaagaaaggggagtaacatggggctactaattattttactagtggttctagtttattacttactcatactgctaggaactcactttgagaagaacgctaaccattatatgatgaaatttatggcaaaatcaggtatgaatgtacctgaaatcccgtatcaggattctttagaccgaggagaatatatagcttgcaccacaagtgcattgatacttttaggtgttctacttttattttactttggtgttgacacaggagctatttaatgatacactactaatataaacttaaggaggaaacaaacaatggatattaaaactaatttacaaggtgggtatgttccaccacaaggctacacaccacccgtaagtaagccaacaccacaagatatgtttgtcgtagcaccatctttagatacggaaaacttatcattagaaggcttcaaggactacatgcaggactatgctgaattagaccgagttgctaagttaattaaagagaaacaagaagctattaaagaagttgtgcttaaaggaatcaaagaactaggaatggactctgttaaaaatgagtacggaacctttactattgtacctaaatcagttgggacaactttcgattctaaagcatttaaagaagatgcaccaaaaatttataacatgtacttaaaagatactagtaaaaaagagtatctgaaagttacagctaaaaaagtaaaataactgaaaaggagaaaatctatgctagcaaagttaaaaaaagaaaaattagatgctcgtaaggcaggagacaaaacaaagttaaccgcaattgactttgttatgtctaagctagacaaaaaacgtgtcgaagtaaaagttaagacagtggatgaactttcagatgagcaagtccaaaaagctatcgagtctgaaattaaggaacaaaaacaatcgttggagtttactaaaggtactcctgtaggtgatgataacgaagcagttatcaaatatttaacatctcttcttcctgagaagttgtctgaagaagacattaaaaatattctaagcaagcataaccttttatctgtagacaaaacgagtattggctcctcaatgaaagaagctaagaaaatttttgcaggtgaatctgtagatatgagcttagtgtctaaactagttaggggataactatgtttagtaaaagttcccttggtattcaacggggtgtagacgacaagataactactagaattgaagggtcacctacagaggttctagtgttgttgtccacccttaatgctaaggtcatagctgagctagcagaaacgccaagagagtatgctaagtttagcacaaaaatacaagaaaacacgatgaagatgtacctagctatcttatcggagtctaaggaggataaataatgggttgtttagtatttctagtcggtatgttagtattggtagctatcttagctattcctgcctttctaattgcattagttataactctaatatggacaacgttatcactattaaaagtgttcatcattgtatggttaatacttattgtgattaaaatgttgttctaaaaagtttaaaatagataaggctactacttagtgtatagtcttattttttatggtttagctattggtaaagttgtgctatactaatattactaggctaaaagagagggtgattatattgggtcaagagttagggttattaaacgacttgacagtcatcaaaagagatggcagagaaacaaagtataatactaataaagtatacagagctattttaagagcttctaaggggcttagagacaatcctgaggagattgctgataagattaccactaagatagaagcagggcttaaacgtcacgtaggagcctgtgatagcatgtctgtatctgagttacaagacattgttgagtttgagctcatgaagtctatgtataaggatgttgcaactgcatatattgaatatcggagtgcgagagaccgagatagaaaagatactacagatgtgaatgtgactattaacagattgttagctaaggacaaaaagattgtaaatgagaatgccaataaagattcaaaaacatttacaacacatcgagatttaacagcaggtgtagtatctaagactacaggtttaaaactcttacctaaagcagtagctaatgcccatatcaaaggagatattcactatcacgacttagattatcaaccgtacagtcctatgacaaactgttgtttgatagactttaaaggtatgttagagaatggtttcactatcggaaatgctgaagttgaaagcccaaaaagtataaatactgcaatggctcaggtatctcaaattattgccaatgttgcttcaagtcaatatggtggatgttctttcaatagagcggacgaggttcttgctaaatatgcagagatgaattataataaacattacgggcaattattatcctttgcttttcctaatgagaaccaaaaaataatggatgtcagtcatgtagtcgaagaggcacaaagattaactagaaaagatatttatgatgctatgcaagctcatgagtacgagataaataccttgttttcaagtaatgggcaaaccccattttataccttgaattttgggctaggtacaggtatttgggaacgtgaaatacaaaaagctattttacaagttcgtattaaaggtttaggtaaagaagggcgtactgctatttttcctaaattagttatgggaatcaaaaaaggagtcaatttctatcccacagaccctaattatgatattaagcagttagctttagaatgtgcaactaaacggatgtaccctgatattcttaactatgataaactagttgagttgactggctcatataaatcacctatgggttgtcgttcgttcttacaaggttggcaggatgaaaatggtaatgaagttgctgatggtcgaatgaatttaggcgtagtgactttgaatttaccacgaattgcattagagtccaacggggataaagaagctttttgggagttattcgaagagagactagctatcgttcaggaagctttagtatttagaatgaaacatgttatcgaaaatgctagccctgatatggcacctattctttataaatacggtgcttttggtaaacgtttatctagtgaagattcggttaaagaagtttttgaaaacctgcgagcaactatctctatgggatacattggtctttacgaagtagcaactgtattttatggcggagagtgggaaggtaacattgaagctaaagactttacgctagaaattatgagcaagatgaaaaatagagcgttagagttgagtaataaatatggtgtatggttctctgtgtactctactcctgcggaaagtttgactgaccgattctgtagcatggataaagaaaaatatggtgaagttaaggatgtaacagataaggactattacacaaatagttttcattatgatgtacgtaagaatccaacaccgtttgaaaagattgattttgaaaaagaatatcctcaattctgttcaggagggtttatccattattgtgagtatcctgtaatgacatggaatactaaagccctagagcaagtatgggactattcttatgataaaataggttatttaggtacaaatactcctatagataaatgtcatttatgtggttttgagggagagtttgagcctacagagataggatacaaatgccctacttgtggaaactcagaccccaagactgtagatgtagttaaaagacagtgcggttatttagggcaaccacaagctagacctaatgcttatggtcgtaagaaagaaattgatgcacgagttaaacatgtttaactattgacaaacaaataaaaatatgataacatataatgaaaggtgaagtaaatattatgggaaaagttgtagtatactcaaaagcaaactgtggacaatgtacgttcactaagaaagaactagataaattgggggtagcttacgaagaaaaacgtattgacttgaaccctgagtttcgggatgaagcaattgctaaaggcgctatgggtgcacctttcgtagtaccaccagtaggagaacctttctcagggttccaacctgcaaaattagctaagttggcagtataattgattattgcctactacagtattacaggcaatgttaagcggtttgtagataagctatctctaccaagtgtagagatagaccctgcaaaccctttcttatctataaacgaaccttttatcgtagtagcacccacatacgaaagagaccttacagagcctataaatgatttcattgaaaacaacgatttaagcaattttaaaggggtgatgggtagtggcaatttaaactttgctgacttgtatgtatttacggcaaaggacattgcaaaagagtataatgtaccgctgttgtattccttcgaatactcaggaaccgatgaagatatagaaaaaataaacaagattttgggggacattaaatgactacgtacttcgagttaaacaatcaggttaatatacctgaaaatgatactattccattgcataaagataaagaggctgttaaagcttattttattgaacatgttaatagaaatactgtgtttttccatacactaaaagagaaattagattatttaactagtgaaaattatattgataaaacaattttagataaatatagttttaaattcacgaaaaaattgtttaaacgtatatatgataaaaactttcggtttcaatcttttatgggagcctataaattttatacacaatacgcaatgaagacaagtgatggggaacgttatctagagcgttatgaagaccgtattgcatttaacgctttaatgatggcagacggagatgaacaactagcggtagatttagcggatgaacttattaacaaccgttatcaacctgctacacctacttacttgaatgcaggtcgtaaaaatcgtggagagtttgtatcatgtttcttactacaagtagaggatgacatgaactcaatcggacgtactgttaatagtgcactacagctatctaagttaggtggtggtgtaggtattaacctttcaaatatcagagctcttggagaccctatcaagaacattgataatgctagtagcggtgtagtacctattatgaagcttttagaagatagtttccgctatgctaatcaattaggtcaacgtcaaggagcgggagcagtatacttaaacattttccatgcggatgtgattgatttccttgctacaagaaaagagaatgcagagtcagctaagcaagttaagatgctatccttaggtcttgtagttcctgataagttttatgaacttgtagaacaagatggtatgatgcacctattctcaccttatgatgcaagtaaggcttatggtgtccctttctcattcattgacatcacagaagagtatgagaacatgattaaaaaccctgatattcgtagcactgtagtaaaagcacgagacctagatgcagagataggaaaactacaacaagagtcaggttacccttatattatgaatgtagatacagctaaccgagctaaccctgtaggtggaaagattatcatgagcaacctatgttcagagattcttcagcctcagcaaccatctgtgctaaacgaagagcaagtatatactcagctaggtactgacattagctgtaacttaggctcgattaacatacctaacatgttagaaacgtccccatcaatcgaaaagtctattgaaacagcagttagagctttaacctttattacagatacttctagtattggggaagttccgacagtgcgtaatggtaatgataaagcacacacaatcggtttaggtggtatgggtttacacacactatttgctaccaatcagattcattatggttctcctgagtccttacaatttacggacattttctttatgatgatgaactattatacacttaaagcaagcaataaaatcgcacaagaacgtggagtttcttttgaagggtttgagaaatctacctatgcagatgggacttactttaaaaaatacattaatgatgcctacgattatttcccaagctatttacaggtaaatgatatattcaagaaccaccatatccctactaaagaggactggattgaattaaagcatagtatcatgagctcaggtctatatcaccaaaatagactagcagttgcacctaacggctctatctcttatgtgaatgaaactagtgcatccttgcatccaatcacttctcttgtagagaaaagacaagaaggtaaaattggttccgtatactatcctgcacctagattatctaatgagactttaccttactataagagtgcatatgatatttctatgttagatgttattaatatctatgcaagcgctcagaaacatattgaccaagggatgagcttaactctatttatgcggtcagctatacctgaaggtttgtatccttggcttcctaagggtggtaaaatgtctacacgagatttgacattattacgacactacgcatggaaaaaaggtattaaaacaatatactatgtacgtacttttacggatgatgaccaagaagttgggattgcacaatgtgaaagctgtactatttaggaggatactatgaaagcaattaattggaatagaatagatgacgtaattgataaagcaacatggactaagttaacagaacagttttggcttgatactcgtgttcctgtagctaatgacattaatgattggaacaaactaagccctcaagagaaagaccttatcaacaaggtctttggggggttaactttgctagataccttacagtcagaagtgggggttgaatctttacttaacgatgcagtaacacctcatgaagaagctgtgctaaataacattatttttatggagtctgtacatgctaaaagttactcaactatttttagtactttcaacagcccaacagaaatagataatatttttgagtggatttctactaacaaacacttgcagtataaagctaataaggtagaggaaatatataaaacaggtactcctttgcaaaagaaagccatctcagttttattagaaagtttcctattctactcagggttctataccccactatattatcttgggcaagcaaaaatgacaaatacggcagaggtaatcaaactaattattcgtgatgagactgttcatggaacctatattgggtacaagttccgtaaaggtcttgaagccttaccagtagaagagcaagaagagctaaagaattgggtcgttaatattgcctttgacttgtgggacaatgaagtagcatatacccgagacctatacagctacaacggttgggtttctgatgtagagagatttctagagtacaacttgaacaaagcaatggataatttaggtctatctcctttgttcccaaccacagcatccgatgtcaactcagtagttataaacgggttatctaccacgacaagtaatcacgacttcttctctcaagtaggtaatggatacttattaggcaccgtagagcctgtaactgacagagatttcttgttagttgataatttaataaataagtgttgacttaaacacgaaaacatgatatactttgtattgtaagatacagagtatatttttttaggaggtatttatggaagctgtagcatttgtagttcttcatgaaaagtatccgttagttacattcgactatgcagttgcggaaactcatgtagcagtaatatcagaaatgttaggggaggaagtctccatcaaagaagtaccttttgccaacagtgcagaagcaggtgctgtaataagcactaagatagcgattgacaaattttctaaaaactaaggaggaactaataatgggactatgggctgagcgttatgtagtaaaggctacaagagcaacaggagcagattcagtattgatgtttacttttactaaaaaagaggatgctgaggagatgcttccaattattgcaaagacttttgatgagaatatttcagatttatatgttgatgtgctacgacatattccatcaacaaatatcgaagcacttaaagtaacactagcaggagtaaaagaccttagggatgcagagaaattagaaaagaaaactcgtgaagagtacctacgacaaaatcctgatgaatattggaactcttctaaagaagaattttgtaagaagccaacacccgtatggggtagatttggtgagggttggtggcgacatgttacacctgaaatgttttttgaggatgaggactactatgtagacctatttaaagagtttggtggaaatatcatggaggctcttatggttaggggtactcctcgcatggtggataagcataaacgtgagacaaaacggatgtctatttatgagaaagctattcgagaaggcaaatcagtaaacatcaactctgttggtgggtacaatgactttgatgtagtagagattatggaatcagaagatgagcctagaacgcaaggagaagggctcacaggcattttaatgtacgatggtatcttttatccttgcttatacgggaagcatcacaagctcattcagacactcagaggtaagtatcctgatgaagtgttagactcttacagcaaactagcttctgaagacattgagcagatgatattctttttctctcatgggcaatcacctatagccccatatgatactatctctgttattaatagacaaggacgtactctaagcggtgagtctcttgattggttgagagagaacaaaaaatatatgtcggatgtccaaagtagacgtttagacaattatgtaggaggaactaatgagaacatttgatgatttatacatggagctaggaacaaaattattaaaagaaggtaaacaacaggaagatattgagtctgttcgtgcggtatacgcagatggagagaaagctgtcactaagtctatcgagggagtctcttttgagataacccccgacatgggagtccctattttaacttctaaacgagttcctgttaagtctcccttagttgaactacagtggatttggcaagaaatgtctaatgacgtttcatggcttaaagaacgtaatgttcatatatgggacgagtgggagcgctctgatgggacaattggaaaagcttatgggtggcagttagctaacaagacacgaaatattccattagagattgcaaattgggacaactgtgatacttccttgaatcaagttgaatacatgttgcatgagcttgttcacagccctagttctagaagaatcatgacaactttgtgggatgttgacgacctagatgatatggcattggagccttgcgtatggtctactcattggacagttcatggaggtaaacttaatttacacgttaagcaacgtagtgcagatttttgtttaggtcttccattcaatgtttatcaatatcatgtccttcatgcgtatgtagctaaatttgtaggcttagagcttgggacaatgcactggaacatcgacaacatgcacgtatatgaacgtcatattccaactttagaagagcagtttactaagtatatggtagaccttatcagcactaagatagtagaccctaaaatgaaagctcagtttggtattcaagacgttgttactttaaatattcctaaagattttgatatgagcaacttctttaagaacaaattatcagaggctacgctatcagggtacaaacccttagctagttataaatatgaaattgctatctaaggaggataaacatgaataatgatttagctaaagtttgggagatgtgggaggagttatcctcccattcagggaaaaaagataaggtagctatcatggctcgttattttaaagaagaacctatattgtatttcttggttaagtttttagtaaacccttatgtagttactcaccttgggcgtaaaagcttggataagaaagtaaaagaaggggactatgttgagatacccgacttagaatggttaatgatattcctagctgattgtgtaggtgatgataaggatattcgttcaattcaacatatgatggctaactgtgatagtaagtatatcagtatggttaggagcattgcaacgaaaacaggtgttcctttaggtgtaggagttaagttatttaatgaagtgtgtgagcaggaaggtttagatttatgtcctgattttggtgttatgttagctaaagatttaagaaaagaaaaatctttagaatttattactgaaatggttgtaacattaaagttagatggtattaggtgtgtagctgttaaagataagtctttgttaactttttacactcgtaagggtattcctattgaaggtttatacgagttggctaaagaaatggaaaacctaaaagatggttatgtttatgatggagaactactattagaaaaccctgagggcttaaatagtggtgacctattccgagcaacacaatcagtagtccgttctaaaaacgataacaaaacagggttggagttccatatgtttgacttgttacctgtgcaggaattttataacggcatatcatctaaatcttacgatgatagacgaaaagagctagatgaaatacctgacacagcccatattgtaaaagttcctgttttatatagaggtaacgatattacagaggtttacgctattgctaatagcttaatagaagcaggtagtgagggtgttatcgttaacaactcttctgctaaatatgaaacgaaaagaactaagaacctgttaaaagtaaaagggctatactcaaatgatggtgtagttttagacttttataaaggaaaagaaggtactaagttcgagaataccttaggtggtatgattgttacttacaaagatggaacaactaaagtaggcggggcaatcagtgatagcctacgagatgagatatggaacaacaaagacaaatacagaggcaaagttgttgagtactactttagtgagaaaagccaaaatgctcaaggcacggaaaatgtacgttttggtagacttaaaggttttagattcgacaaaagccctgaggatgtgaactatgaagattaagtattatgcggtaaagaaaggtagaaaaacaggaatatttacctcttgggatactgcgaaggaatctatagaaggttatcctaatgcagagtacaagtcgtttaaagacttaaatactgcaaccagttacctacaagaaacgacatattctgaagatgagcctgatacatactatgcttatgtggatggctctaatcttggaaatgggtctaaatatagcgggagtgctattattgtgtacaatgacaagatagtagacgaagtaagcctaagtggagataaccctgatttcacacctaaaagaaatattgcaggggaaatcatgggagctctcttagcaattcagtgggcaaaagataacaaggtgacagagttaattatatgtcatgactacgtaggtgttggtaaatgggctacaggtgcttttaaagctagagaccctttagcaaagatgtataaacagcaagtagaccattgcatccaatcaggcatagaccttaagtttataaaggtagacgggcacacaggtcatgtatataatgaacgagcagatgttgttgcaaaggaggctttgggtattggtaaataaagctttgaggtggaaatctgataattacagtaagtggcatgtggctgactataaaccttttatgttcgttgatggagaaggtgttcgttgtagtatctacgttagtgggtgtctgtttaactgtaaaggctgttttaacaaagcaatacaagatttcaactatggggaaccttacacagaagagcttgaagataagattatagaagatttagctaatgattatgtccaagggctgactttattaggaggagaacccttcttgaacacagggttgtgcactcagttagtatctaaagttcgagacaaattcggtgacactaaggatgtgtggtcatggtcaggatacacctttgaagagctgttagatggaactcctgataaggtagagttattaaaaatgattgacgttcttgttgatggtaagtttatactagagcaacgagacttaaccataccttttagaggaagtcgtaaccaaagagttattgatgttaaaaaatccttattagaaggaaaaactatcgaaatcgaaaaatatatgttgacttagttgacaatacgtggtatactctctatataaggtagagagtatatttatttaggagggtaaacatggctaaagattattttacaaagcacgaacgagaagaaacaaaaggactaactgccgaacagattcatgagacactagcatacatgacagaccacggaatgataaaagagaagtttcctgaacggaaagagctgattggtaaattagtccaacataagaaatcaggagacatcggtaaagttacttttagtagctttggtatttctattgcaggggtcaatgatgatggttcacattggcaaactttaggggatgaccctaagtcggttatggaacaatgggaggttgtaggagatggggactagattaacagttgaagaggctataaagtattatactgatagctataaatgggacttatgggcaactttgccacagactcaaggcaaacaatacattgatgacataggtgtaaacatcatcctgcatcaaagttcgggagatttcgagttaatttataaggtaccccatacagtctttaaattagatgttagagcaggtagctttactaatgttgaacacttcactaatatgtatgttaaatttacatctattgtggctagtattaatacgaaccctttagtaaatatattttaaaaatattagtgcgcagtgttgacttttaaacggatataagttattataataatgtaaggaggacaacaatgaagaaagaatattcagtactagaagagaaaaagctatttgaaggtgtcgtctttgatgtagtagaacgagacattgaggtacgtgtacctattggtgatggtttagatgaagtagaccatatcaaacgtcaggtagtgacatacggagactctgtacttattgttcctgtaacaaaagatggtaaacttatgtatctcggagaagaataccgtacagtagttaatggaacgcaaatcggtttccccgcaggtcgtattgaccctgaagacccaacctatgtaactgctgttcatagagaattacgtgaagagttaggaatccatatggcagaaggtacccaacctattcatttatttagtgcttatgcaagtttaggctatacattagagcagattcatgcgtatatggtttacgtagaccctattgatgaaaatacagagttaaatacggaatttgatgctgatgaatacgttgagcttcgagttttgaagacaacagatgttgaagagttaattcgtaatggaattatcaactctatgtcggctcagctagcttttatgaaagcagttgatgttttagctaatgaagatatttaggttaaaaaacagcgctaattctacttggcatatttccttcgaaagattaaatggtagagattatagcctatgtggtaatgctgatattaaatcctattttgaaagtcaagctataaatgagaaagacatttatgttgaggactttaaagataatggtaggctttgtccgagctgtgtgctgaaagcttaccaacatgggttggtatccgttaagaaaatagattaaacgtaaaggagaaatactatgtataaacgaggtattgtagtaggtaaatttgaccctcttcatagaggacatgtagacatgattcagtgggcatcgggtaaagctgaagaaattattgtagttattagccatagtgacattgtatctgatgctttatatgcttcgtctaatttaactaagaagctaacaaagtacgataaacttaagattgttcaaaaaacatttcaacaacaacctaacatttatgctgtattaattgatgaaacagattgtcctatgtatcctgatggttgggcaagttggtctgatttggttaaggaaggggtgtcctccgtagaaggggtatctattgagggacaacgagcaatcagcaaaactgcgtgggaagacaccgttttcttcagcagtgaacctcaagacgagattaactataaaaaatactttgggtgtaagggtgtagcattatacgaccctgctagggagcgctctaaggtgtctgcgactaaaatccgtaaagaccctaacaaatattgggagtacttaccacgggctagcaaggagcttttaagtcctatgattgaaatatcaggcggtgaatctagcggaaaaactgttatggttgataaactaggtaactattatggaacaccgactgtttgggagcgtggtcgtttatgggctaaagatgagcttggtggggatgagcttgcgttacaatcttatgattacacccgtattgctatatctcatcatgaggacgttatgtttgcgaaacgtaatgcaacaagatttgctattacagatacaaagtacgttagtacacaagctttctcaatcacctacgaaggtgaggaaaacgctatcgtagaagatttaattattgcagacccttcggatttagttatcttactagacaactcaacaaaatgggttgatgacggtatgcgtaaagttggagaaccatctaaacgtcagaaattccaagaacttcttaaggagctgtatcatagatataatattccttatgttgaaattaaggattctgattatgcaaatcgttatgagctatgtaaaatggttattgatggatatattaacgattatctatcagttgtggagttgcaagaaattgtaaataaggcagaagctaagttcagggcagataaggagtaaactttatgtattggagagaccaactagctaaactgaatgtaggagaccctgtatggataacagagtacactcgggttaataagacccgcagtaaaccatactctaaacttgaacctgttgagggtgtcgtttatcttaacgagctaggtaaaaaagacattaagtatcaagcagaaggctaccatagagaaattgaattgtttaaaacaaaagaggaagctgtagcctattacaacagtttagtacagcaacattatgatgatatgcttaaaacagcaaataaaataaaaaaatatttaattacagaataggagaatggacatgaaagaagtacaaccaacatttaaggacaagtattacagctttatgaacaaagtagcactagaaggaggttcttggcgtaatatctatgtagtaggtattattcttgtagggttagttattgggttcttcattactaattggagtggggtagttatctcagaccctagcacttggacggaaattgggttcttcattacagcatactgcttaggcgttccttgtgtagtcttcttagctaatcgagaaggaaccttaggtaacatcttgggtattttgtctaatatcggtgaaatgttaatcttttggtattttggcacaatgggtatggtgttcgcaggagcttactttggcttgactcacctaattggtttagttcggtggaatgatgacaagtttaaagatgagtcaggtaaggttaagattggtactatgaaaaaagaacaaacaatctttacaggtatcttcattgtagtcgggctaatcttacttgtgttttttggtggagtattcggatttgttcagggtgcagggacactagggttacttatttggctaggtaatttactaacatttgtaatcagtgtaacagcacagtttctaatgattattgggcttaaagaatcttggacattttggttctcatctaactttatcaacttcttcttaaacttaacttcaggtaatgtttggtttatggctcgtgatgtattataccaagtaaacgcatggttagctatgtatgactggaacattcgagcatattatgctaaaatagaagaaggagagaaagatgtaaaagttcctgcgggtgtacgtgtactcgaatggaataaaaaactagataaattaggagtgaagtagattgagtattatcactacagctagcggtattatgggtatcgtacctgagaatgacttgattttattgcagaaagttcatgtaggtaaggcaggggttaactatttgtttaaagtagataacccccacttagaagtaggaaacgcctatgatttcaactttcagattgatagacgtaaagccctcaaggtatcctacactgaggatggtcacggagagtttgctctttttggtcattacaagaatactactagaaaaataactgaagggacttttagatacttgttgcataaggatgctatcaagcttatgcttagagttcctttaactgaaaaggtagacattgagtttattgagcaagcttcttttgagtttatcgttaagggcttagaagagtcggaaccactgtcttacctaggagtcgaagtaaaacctctatcctctgtgttggggacacctagtggagaatagaataattgtaggtataacgggacacagaccacacaagctcatgggtggttatgacccgtttgcttttgagaataagatgttaacctatgttctcaagttggaactagagaagttgttgaagaaatataatgaagttgtgtgcatatcaggtatggcacttggggtagatactatctatgcgattgcctgtctagaattaaaagatgtgtaccatgaccgtattaagttaatatgtgcaataccttttgctaatcaatcttctagatggagagctgaaagtaaaacactatatgatatgatactaagtatggcagatggtcaggtaaacacgtcaggtttagatacagtacctgcacatgatgttagtgctgttctacaaaacagaaatgagtggattgtggacaactcacaggtgctttgggctgtttgggatggaactagaagcggaactgctaactgtgttaactatgctagacaaaaaggtctagaagtaaaaagaataagcacagggcttattactaagaaagaagggtgatatatgaagctaagatacgtagctattgattttgatgggacgattactgagcctgctgagtatcctgcaattggagagctcagaccgatggctaaaaagactatcgaacatttgaagaagaaagggctagttttggttctttggacatgtagaacaggtaatgacttacgtgatgctcttgagttcttagaaaaccacgatattacgtttgactatgttaatgaaaaccctgaagagttgcaagatgtttacaaaaacgaccctaggaagctaggagtagatgtattcattgatgacaagaattttgccatcacccaatcagagatagactggcagttaattaagtttaactctgacataaattgggaggtactaagtttagatgagtataaaaaacggtagatattctctagctgatgttcaaggagcaacttttatccctaagaaaggtggactccccgcagaggttactgttatatcagttgcttatggggagcttcctcctacacaggaagagcttaaccgcaatgtttatgcacaacctatgcgatttaggttcgttacttttaattatgtgtgggataatcaggtaatgacagctagcttgaaatggcacaaatttttaactgattatgttagaaaagactggcacgagtattgggtattaaacggtaaaccataggaggagttagtatgggagtaaaaaacatgtctttcacaaaggaagacttagatgcactttctgatgctgaacttgtttgcaggggggatagagaaattggcgcaggaacttacaccgacttaggttatgtaggtgaggaagtgttgaaaatatgcaaaagtatcatttggcaatatcagaatgttcgtacaatttcgaagaaacaaagaaaaactttactagagtttcagtattacaatgaccctgattctgattgggactacagcggtggtctttatgatagctttgactatgattatgacttttttgacccaatgttttaaaaaagtgttgacaccctattaaatacgtgatatactatgggtataaacgataaggagagatattatgcagaacattgacaaaacaaaaattgctatcatttcagtagccgtggtattcattctaggtcttgtaaccttttttggggttaagaatgtagagaaccgagctatcaagtacgaaattaacatcgaacaatctcaaggagatttaaacgctgaggaagttcgtagagtagacttgttttctaacttagtggactctattgagagctataatgactatgagcaagagactttggcgttagtagttaaagctcgacaacaagcagagaatggtaacgtagattcagctaagagtacgctaaatgtagtagtggaacagtatcctgagcttaagtcacaagataactacaagcaagcaatgaaagagtttagtattactgaaaaccgagttgcaagccatcgaaaatcttacaatcgacaagttgctgagtacaaaaagtttactagaacatttgtaaatagaaagctgttatccttacagggttatgaaacacaagactacgaagttatgagtattcctgttaacccaacaggtcatacagacctgtttagtaaatgagacgggatgagttaaaggttcgatactttattttacctacagttatcgtagcctttatgattatgacaggtatttggattcacaataagatggaagactctaggttagctactaatactatgtatgagacagctattcctgcggatgacaaagactcttatgattatatcttagacacacagcaagggatattctacacacatgggttgtttaccgcagaacagcctgtagagttttctgaaattgatggtaagtatgccgagcttgaaagaagagaagagcactacgttatgaaaactcgggtagtaacgtacacagattcagaagggaacacccacacaaaaacagaaacttattgggaatgggagcattaccatacagattatttatctactaagactattatgtttaatgaccacagttatgattatgacaaattttcaggtttccctgaatcacatatcacaactagacacccaaggtcacatgttcgagtgaagtactacggtgtacctgttaagatggagttgacttttatagctaacgcttcagaaaaaggattgagccctgcctttggtcgaaaaatatatgtagagagtactgcttatgataagtttgtagaaagtaatatctctgacggtaaagtaggaaccatattttttgtaataatatgggtagtcctcacaggggtagctttgtatgggtatatatatctagaagcaaatggatttaattaacaaaaagtgttgacattaactagtatacatgatatactatgtatgtaataaaaaaaataaactaagggagctaataaacatggagaaagaaatgttagaacaactactaggtattgaagaaactgaagaagcggaagaaatgatggaagggttgcaagcattcctagaaatgttaactggtgcgaatgagcctaagttgcgtgttgtgttaactttcgatgaagaagttgttgaggggtacactcacgataccatcgtagggactgttcgtgggttgaatcgtatgaaagcagaaatcatcaaaaacaaggagattcttgaaaacattgctcctgaaggagccgatggaaaaactcccctttcggaagaagaggttgggttgattcagttagttacagcatatgagcttggcaaacaatttgctaatgactttattgcttctcttgctgaagatgagaaccctgtggtaaaaggtatctccacagagaactatgacgagtgtacttgctcggtatgttctatctccaatcagttagaagaactaggcttgttagaagaagacgagtaacagctaagaacctacacaaaaaagtgtaggtttttttatttaaaggtgttgacttataatagaatacatggtatgattagtatagtaagggaggctagaacatgagtttaattgtagttgacggagacttactaaaaagcgactgcaccatgattatgcaccaagctaattgttttggtaaaatgggtgcaggaattgctaagcaaatagctaaagagtaccctgaggtatatcttgcagatattaactatggtattcctgttggaagtaaagaccgtttaggtaagtggtcaggtgcttttgtaactagtaactacaccaataccccacagttaattgtcaatttatatgggcaatataactacggtagaggtttacagactgattacgatgctttaagttgggctttagcaacagcactagctcaaactaagtcacatacaggtaaggtaggtgtgccttacggtatggggtgtaggctagcaggaggagattggcgtatagtagcaaacatactagaagacatctcagggggtcaaggtgtagatatttatgcgtataaattataaaggagtgaagttatgaaaaatacaattgagttaaaaggtaaatatgctgatgcaaagatgtttattaagacagtagatggagtaactatcggtcaggttatcacaatgttaaatgagcctgtgactgagggcggtatcgttagaattatgcccgatgctcattatggtaagggttctacggtaggtacaacgattcactatgataaatctatcaccaaggtggttccttctatcgtaggagtagacattggttgtggaattatggtttcctgcttaggtaagttgaaaaatacggatgctcgtgagtggggtaaactagacaatgtaatcaacacgggtgttccttcaggatttgacgttcgtagcaagcctatcagcagttcagttttttatgcagtagaacatatgcttaagtctattaatgtaaaaggggctcatgaagaccagtttgtagctcgtattgcgaactcggtaggaacactaggtggtggtaaccattttattgaattaagtaaagatgaagaagataactattatttgcttgttcatacaggttcccgaggtttaggtgttaaggtagctaaatatcaccaagatattgcagacttataccatgagaatgacgttaaagggctctcagagctcattagcgagcttaaagcccaaggtcggcataaagagattcaaacagcaatcacaggctttaaacggcaaaatgtaaagcctcagctaccataccttgagggtgaggacttagaaaaatatcttattgatatggagttgacacaacaatatgcggtgatgaatcgtaatgcaattgtggacactattcttaaagggatgggttggacagaaattgaccgttttgactcaattcataactacattgatattaaaaataacactattcgtaaaggagctacggatgctcgaaaaggtttacgtttagttattcctttaaacatgaaggaagggtctattatcggtgtaggtaaagggaataaggattggaacgaatcagccccacatggagcaggtcgagtgttgtcccgaagtaaagctaaagagattcttagtttagaggactttaagaacactatgcaaggggtgtataccacttctgtagtccaaagtactttagatgaagcgccaaaagcgtataaagatgcagaagaaattaaagaaattatcactgacactgtagacattgacaagattgttaaacctgtatataactttaaggctaaataggaggatattatgaatttattagagcaatacattgtagaaatacatgaggaaaaaccttataaaccaatatcgaagcttaaatttgattatccccttatttgggtggatgctaccattgactgttacggtagtaaaagtagaataaacagagtttttactaaagatgaatgggaagaatacaaaaagaaagggtatttttgggggtagctatgaataaagatacgattattaaactattacaacaaatgcctgatgacgtggttgaagtccacgtcacagtgcttaaaggtatagaagaccgaaacaggacaggagtagactacgcccattcaagccctgttaaggttcaatctatcgagcttaacggagataaaataattttgcatggaggtaaatcatagtgaatgatacaaaaaaggtcacaactaagtggcaagttgatggtaatttagccgtaatttatcgtattgatgacttactatgctactacacaaaacaaaatgacccacatttcaaactaaatcaagaggttactcagggagacgtggacaaaaaaggcttatataaggttactctatatgagcaagataatttaccgtcagatgcttttgtagatttaactttcaattggggtggttaacatgtataaaaaagctaaagtaactcatacagcagtaactaaagtaacagatgtgttaagaacagaaaacatgctgtttaattttggtggtattgagggtgagttaaagatatatcaaaatttagataacgttcgtgtgtctcttttaagtggagattttgatgacatgacttttattgtacctacaagtgcaggagatgtcattgtggataatgatagtgcatggttgaaaggagaaaataaatgaatattgtaaaaacttcacgaggaatgctaacagatgatttaaagaaaacatggaaggctgttatgggggaagaattaactgtacgtaagctacgtttattaccttttgtagattattctatcaaaaatggtaatactattcccgcagttaacttagagcctgctgaaatggagatattagagcagtggcacgaagacgggcacattttatacgatggagacaaggtttacgtgacaatgcctttctacacagctatgcaaactgtgttgttctatgggtatacgtcttatttagagtaacagtgttgacaacagcacaaagtagtggtataattatctaaaatacagcatattaaggagaaaaactatgagttttgttaagttaagaaccatttttggaggaaataagagtgcaacagacattaaaaaacagattgaagctactagtgaagaagaaaatatcatgattactcgtctaccaaagaagacattcgatgatattaagtggaatacagataaaattattgtaaataccgcagaacaggcaagaaatgtccgtggaatccctactttgacctactgtttatccagtcagacagcttttatctaccgtagaccagtaaaatcgacattatcagtagccatcacttcagcaggtcttgctgaccgccatatcgtagatgaagttggtttaactgtacttttaagtggatatacacctgtttattttaacgatattggtgtagatgacattcaaaaaacattaaaatccgttgatgccatcaaagaaagccatgcaattgtatctgtacaaggttttgaaggggcgcttcctgtaattttagcaggtttagtggatttacctatcattgcagtccctacatctacaggttatggagtatcctccgatgggtacacagcattgaatacagcattaacttcatgtacttcgggtatctcagttgttaacattgataatggttttggtggtggagctcaggcggttagaatcttaactcaaattgaaaaactatctcgattcgatgcgcagttaaacttagacatttaaggagagtaatatggaaaaagagatattagataacactgagttgctaggtcagatttgccacttggatgatggtagactatttattattttacctaatgacaagcaagggtttagtgaccgaaaagcagtgtcagaagttcacgacatatatgctcggttccatcaacaacaatctaaagaaggctatgttaaaggtcatggagatgttcatatctatgtgggtcaatcattaggatatacgaaacaaaataccttcaatgataccattcacagaactgtaatattattagaatccgagctatacggaatgaaagtaaccaccgtattggaggctaaagatgattaatattagtagacgaataatgggatttaagtctcatgattggaagcttttatggttcttattcaagaatatgcacattcagctatttaaaggtgattggttagaggcatatgatgcttggatgtggatacgggtgcatttatcctatgactcaacctatgcacctaatgaggaggagtaatatgacacctaaagtaagagttttggtgaaacctgtattgaaaccttgggttccttggaagtatgttacagatgattgggataagttgacagaaaataaagacgaggcagggatttttcaagataatgccctgtataaagtacaagactattatttctttagtcggttagattatgaaatagtgtgaaggaggagaaaatatgttacaagctagatttattggagagaacgggtcgagagtattcgaaacaggcaaggtttacacctttactaccaaagttgataaaggtttactatggctgtcagagattgatggtcgtatgtgtgggtattctaatatggaagtcttgttagacaattggtcttttgatttagataaggagaccaaacctttagccacatatgagatgagagctacaggcaaagatagtacagggtattactacactcgatgggatagagctacccccaatcaaagttagagccacttctaagaaggaagctattaaaaaagcagagcaggcactaggaaccccaccaaggctgtctgacatgtgggcaataactgtagataacattgtagtagactagggggttactgtatgttattattgtacatggtaataattgcactactttgtgtgattattactctaggtgttttatgctataaacaaaataaacgattaaaaaggttagaccacttaaaaagtttgcctcttaatgagaagatatttggtttaattgaagacaactatgatgaatttggggatatggcatgggatggagttcaagtagtatttaaccctagtacggaaggggctatgctttcaaatgttgattgtatagaggaaaatatatatggcttctttaatgacatatcggatgagctaatagaaaaagagcaagaaaatgcctcagggttatagtaaaaaggtgttgacttgcgtttacgtttttagtataatacaagaaaggggaacataatgttacaagcatatatatgttatgagtgggttaccgttaactatgtggaagataatcatgtggttattatagacgaagggggcttccctaatctataccctattgatgctactcgtatccgtctcgttaacacggagcaaaccgtcacatacgcacaaagtattccaaaggagatttactaagatggaaacaaaaacagcatatctattggtcgatagtacactaaacgacctcagaaagaattataaatcgggcatgacttttgaagtgaatgaccttacatggatgctcacaggaagctatacagagaccgccacagggttgtacagtctagagatggtacttgtaccacaagaagaggaagagcccgtagacagccgtacagaggtcgagaagtttattatggttgtagaacagttcattatgggcggtgaaggcgtttctgatgttcttgattcccttgtaaatgaaatgtccgagaaggaacctacacaagtggatgagacatacttaacaggagaagtgggtagaatgttttggtatggttgcatgaagcgtgcgataaatgtaatgaagagctttgaaacaaactatcaagaagactacgacttctacaaagatgtgggggtatttaaacctaaggagggtctagatgtcgaatagtatagactacgttacaatacctattcagaaagagcctgagaaatggaaggtattgacagaatctgttagcttgactttgcccgacaccatttcagaagaagattttagtaccgcactggaaagcactaagcgttacttagcaactcaaatcgggttaaaaattattgaagcttacggtatggatttagcatatacaacttggcatgataatacgtacaagactagagtgtttacagcttcagcccctgtaggctcataccaagaggtagatatacctattattaaggaggaaaacgatgaataagaatacaggagacgaattagcaagcgcatggggtaaattgtttggggctttagttctaatggtgttgagccttgctattggagggtatgttacgatgttcttgtggaacgggttaattgctccaacctttggggtgttaacacttacatgggcacaggcgcttgggctagatgtatttattagctttatcacagctaagactaccccaactacagaagagtccgtttggatgatatttgcaaaagctactgtatcaacgttgctatttatgcttgttgggtgggtagtaatgttctttatctaaggaggtaagagaatgattgaggctaaagttagaagtgaatggctacctgttgtaggtattcataatggttatcttgaggtagctgacccctattcaggaaaagtagaagtttactctattgagactacagattttcagatacgagatgatagcaccaatcaagtgtacatgcgtaattcaaaaaactatgtgcatatgtttgatgcaggaacaatgcttaaacctgagctgaaaggagtatctgtccatgaacagtttagagactaaggagctattaattacttgggcaactggtttacctgatatggcaaaaactaccactcctttgtttacttttggtgccaaagagttggaagaacaagctaaaaacaatagagatagacaactattagactctgaaacgagagaccttgcaagagacattgtatgggaagctttgagactggttttacctgctgaggtgggggagtatgagaaacacaaaactgcaaaaacagtgataataaaggacatcccccttgaagggggtaaactatttgggagttacctcttccctaacaattcttatggtgtctctactgagtgtggcttagaagaattaacaggagagcagtctatatcctacggtacggttaaggctattgagagtctaagtagtagagcagttacaaaacagatgaaggaagcgcttactatataagaaaggatacacactataatgtttgatgtagagctagtttatgaagaaagctattaccccttgaagagtaagtcaatacagcttaagttacctatcgtgcctacggtgggggatagggtttcagtcgggggctatatttatacaataacggaaagaatggttaaaaacaactactcagatattaaaatagtttcagattttactaatagaatttcggagggttaacatgttaaattcaagaggggctaagttattgcctattcatacgaaagttcgattaaagaaagactcagctaaacgaatgggtgtagatgctaggcaaacgtttacaatagttaactatgatactagtgctaacagaggttacactgattactatgttttaggtcgaggaaatatgcagagatacgtccactacaccgaagttaaagaagtactatcaaaagctaataaacctaagccaagaattgttactgacccgcctacgttggagcaagtagttcagcagttaggtcatggggatgtaacagaagtgaatgtgaaaagcgacctagttcaaggtattcatgaggttagctttaaggtagagactaagtatgtttttcctgagttgatgctagggttgttcgacaacagttcaagtgaggaggatgggcatgaataaagagttattcctaaacaaagttaacaataaagagactgtaagtactaaagttttagtaaacaatgctatagagtatgttgtcgaagttgtggtaaaagacggagattctttttatcaagggactatacacaaagctgaagggcatagattagatgtttcaggggatattaaagaagttgtgcctgttgaagtaacatccacggagtaccaagaagtgttaacactcaaaggtacgaagcaagagcttatagataagctatatgatgctataagacctgagattgagtatctatatacagatgaatcagaaccttatgtagggtcatataaagagtatgcgcctgtttctgatgagtatattaaagaagttgcaaaagaagtaattaacgacatatttttataggaggataaacacatggaaaaagtaaatggctacactattattgaaattgagtcttttatggatttaggttcagtatgccctacacaaatggagtttgaagacactgagggtcatgaatactacttccgcctacgtcatgggtatgcaagtttaaaggataccactaccaacaaagatgtcattgagtcatgtcttatgggtgaaggtcttgatggtctgtgctctacatttgatttgtttatatgggcagaaagtaaagatgtaatcattttagggttacctgacgtagattactctatggtgtttggcttatgagtgaggaagttaaaaagccttactcagaggctgactacagagaggctaaagatgcagggtacgatttagatgtttggcaagagtattgcgaatactataagctaggtgattttacagaagtataaagtaattagataagaaaggggtactatttatgtatgaacaggtatctaactataaaggtaaatctaagtatgagtctatgttagaaagacagggtgacataatagatgagttagaatggtgtaccgagcctgtagtcagggatgtgttgttggcagaactttctgttgttgaagaatatattgataaacatatgtaaaggtgttgacttgtgtatcagtccgcggtatactgtaaatatagaagggggatggcaaggtgacaaaggaagagtttttacactattattttaacaatgggtgtattgatgagcaagacttggaacaagatgattgggggcgtaccgctcttattgttatcgaatacaatggtaagttttatagaagtgaagtgtttgaaagatggggagtacatgacctagataactttacgattctaactcaacctattgttgttgtaccaaaacaagtaacggtaactcaatatgtagtcgaggaggataatgtatgaaacttaagattaagattagccactcaagagatgatatggatacatggggtgagggtcgcaaaacgtacttcattgtagagtcaccagtgccccttaaggagagtgccatcggtgagctagcccgtgcgtatcttagagccataggagccaactatcgagacatgatgtatagggtggaggacttggacgattaatagtgtcagataatactaggaggtgtgcggtttatgataactagtggtagtaataggtggcgtagagtttcttcacgacttaagcatgagtactattattggggagacattcctgatagccttatacgcaagaagcatagagcagagataaatagacgtgagcgtagggttgccaagcataagctacatgcacaagtaaaagacgaatacacctagcctctacatacaaagggtaggtgttgacttctcgatgagggtgttgactttgcgggtacgggtgttgacttctaatatattttagaaataattttgcccaaaaatatgaaccccaagagcccacccccatatgggatagcccccttagtacggtcacaaaacaacggggtggggtcatcctcaagtatatcataggatagccccaaagtcaagccccaatttcaaaaggtggaaaggttgcgaggggttgccccccgttccctaacgtcctaacctatccaaaatggttgaaaggtcaagcgttccctctagtaagtctcttgcattcttttgttggttgggtgtgcctgctagtacgtagcccgctaggtctttatataaggttgttagcttgtctaccccgttaaggtcttctagtgccttataatagccgttgataccgtcatacgcttgtgtgtccgtgataaggttccgtgtagctagtgccaactgattaagaatgaaagttttaaatagttcgtttgagttttgcatttgtaacatctcctcttctttagtatatacatagtatagcatgattgtttttgcttgtcaacccttttgattaactttttttaataagtcgctgtactcgttttccctaaggtttaaccctagcgccttactatattcatagtatatcatgaaaggggctgagtgtcaacccctttgattaagtttttttactagttcatatcaggataacgccccgtgtctgctagtgtgttcccgtccccctcgttttcgtcccaatcgtcaaagtagccttcttggtctagttcgtccattaagtccttaaattcttggctgtccaataattcatctagtgtgttgtattccatgttttaacatctccctttctttactatatacatagtatagcatggggctttcatagtgtcaacacttttgattaaataaatgcaataataacaaaactttttaaacgttccgccctccttgcccttgtgtgtgtagattacaaagcccgttgctataaggtcgataacatagagatgattttaattaaataacacttttaccctttaaagtcgtatagtgtccgcccgttctcggttacaatgcttctttttacgtccgttctcctatggttgctagcatgtgccacggcttcccgtatgttcttatataccctttgcactgtttccccgctcttaagatataaaacgctgttaacctctctaattcccttcatattaaacgcctcccgctttctatttgtattttagtatagttataacccctaacccgtaaaacctcgctacgggctttataggggctttatttgtcgttgcgatgaataatattataagcaatatagacaattgaaaacattactaccaataagccaaaccataaagcaataaccgccaactattccgccccgctttcttttttggttattccgtgggcttttaagtgtgtttcatattcataagcataggataaagctacctctgcatcacaaattttgcacacgcaaagccctgcatcttttttaaagaagtttttataccatttgttgcaattcctgcttaacgggtcgttgtgtgactttaagtgtttattgaaactagtttctagtacttcttttttacaaattttacaagttacttttattttttgtattaccatttataagacccctctcgtcctctctaagcccttctaatcgtttcccttactgtttaccctcctaggtcactccgtcccgtataacatctctaagagtggtttattgtagtgtctgcttacgtccccccaaatctcttctataggtgtgcccgcttcccaatccatgaaattcttttcgagtaccgtttttttcgagtaccgtttcccgtgtgtccttgtcaatgatggtcggttcgtcccccaatagtgcccaaaagtctgaaaactcaaaatccttcatttttaattgtcttgcattaactgccccatacatatgcttacatctccttattagttttgtgtgtcccccttaagtgtaccatacaccgcccacaccgtcaaggggttttatgttacaatactgtttcatctgctaggggctttttaccatgcgcccccgtttgccttttgcaatcagccaccgttttgaaagctcggggcttccttccttgctgtttgttcttctctttagtcaacacttgcccccgtgtcgtccttgtgtgtgtcccttgttccctccttgtcctttcttgtgtcttgtgtgtgcccttgtgtgtcccttactgttccccctcttatatatgccccactaagtcggctagttcttgagcatatatgcttatacgttgtcttgtcttgtttgcttgttcctgatagtattcacttgttacgccttttcttttctgttcctttaataggtttcttgctcctcttatacagtcttgtaactcttcttgtcttcttactgttttacgttcattcattgcttacacttccttatttatatactataataattgtagcgccttctatccttatatctgtaccaaaatatctagtttcttcttttgttgttactgtttgaatatctatgcttacaatctctttcccttgtccttctaattggctagcgtactgattgcataatatttctagttccttctctgctcgtccttgtgtgtgaacatatgtttttattaatgttctcattgtctagccctcctctttctgatataataaatgtaaccaataagaacgcttgttcattttaaagtaatattgatagccgtcttgtttgctttggtgtagttttaacgttctttctttgttgccgttgaataagtcaataactgttaccttgcccgcttccttgtcaatgtttgtgacttcaatagatggattgtatagaatagtgtctactagtcttgtcattgttcacacgtccttttctttattatgtaattagtttatcatggttaggaaagaaagtcaagtgtttttattaacttttttaaattaatttttggcttgctttactaactaagataagtatataataaaaggggctgtttgtcaacccctcttattaagttttttatacgttgtaagaaaattcatcaatgctaggtctgtaacggaatgaacccgctaccccgtaacgccctagtaagaagttcatagaatcacggtcggaattgctttcaccataccaataagaaacgcttttgcttgctaggtcaatctctaatgttttagtaccccaatgccttaaggttaccgttttaccatcattttcgattgcatatttttctcttaattcttcaaaatcacggctgtattggttccacattctaccatttaaaattgcttgccctttgttttctgctttcactactaatttttctaatgttttactcatgtttgacacgtccttttcttttttgttttgtttctttactatatacatagtatagcatggttgtttttacttgtcaacacttttgattaactttttttaatcagtctctttactcactttccctaaggcttaaccctagcgccttactatattc

SEQ ID NO: 4 - DNA, 141034 bp, Unknown
  Description of Unknown: VREML202-1 complete genome sequence
attatcaaacgataatgactatggtgctgttaaaattgactggcttaagattgaaaaaggaggtactagaactcctaacattgactcctacaactatgtaggcactctggtagaagatacagaaacctctacagtagacccaactaagtacacatggacagtatatggaagtataacaaataaaaaagcatatatagtattcgatgttaaaacttttatcgaagaaaattatgctatggaatttgaaaagcttattgctgacctaggagaagaccaagcattaaatactgtgtttgaaaactttaacatctctacagcacttaaggctctagtaagtccaagttcaccaattagtttctcggttgaactatacgatttttctacgagtgcatggcacaagttaaacacggatagtttagacttacgtatgcgtacattcaacttagtagcaaaccgtatcacagactatctaaatgattacaagctattatttgttcgttacgtgttcgataacgaaacagataaagatgcaacggttgaactagacatgttaaatgtactgttcaaataccgtttaggtgaagggtacagtataggactacaatcatctgtggaatcgctaacggaactcgttcctatagaagggtaatagcaaataatatgttataatataaatagggcacctagttgtgtcctattttttaataaacatgctatattaacaattgaatgataaagaaaagaggtaaataatgtggctattgcaactaacaattcacgagtgtatgcctcactccaattaaaaaataaacaagacagtatgtacctagcaattggtaaaaccactccttggactaatgaagatgcccctcctgcaccagaccctactacgactactctaacagaggttatcggttataaaaaggtagcaagagtatctttatgtagagaatatctaccaagtgacgattctaaataccctgtggtgtcctatggttcaagaaaatttacgctaattccagatgaggacggctataaagagcaagcatggatggtgtatgtagaagcagaaattacgggagatgaactaccaacaggaacatttagacaagtaggcattcatactgacttagtgtctaaggcaagttcagaaaagaaagctttgttacctacagatgtaacagatgcaggcattttgcaattttttgaaaacagacagcaacaaaatagaacaagtgatgtaattttaaaagagaagtttattattacaatggaaaataagaagtcagttaaacaataggaagggtgacatagatggctaaaaatattacaaatgatgatttaggtaaagagccttataacaatagatattaccaaggcaaacgattttcaggtttactatttaaaccagataagccgttacaacaagccgagttaaacgagttacagtcaattattcaaggagatttaggcaatgtggctgaatccatatttagtgacggtgacattcagaccggtatggaatacgtactacaagataagaagcttactattaaaaaaggtaaagtattcttaggcggtaaaatgcgtaactttgacgaacagagtatcgatattaccggagagggtacggagtatgtaggtgttaaacttgtacaaaaagttattacagcagaagacgacccatcactgttagaccaaacaagtggtgttcctagccatttctcagaaggggctgaccgattggacgaagatgtagtactagcagttaacgatgattctgcatcaaacatttaccactttgttaacggtgagttatacattaacccagatactcctgagatggacaagattaataaaatactagcagaaagaacttatgatgagtctggttcatatcgtgttcgtggttttgatatgtacacagaagttcacccaacagaccctaacaataaaattcagttagttgtcgattcaggtcgggcatatgttttaggttttaaagtagataaacctacaactactcgtattgatattgaaaaatcaagagaattagaaacaatcaataacgaaggtttctactatagcaatgcaactcgtaaaaataaattaggtaattccccagtatcttctgtagaccgtgtaactgcacaagttgaagttgctaaagaacaggtttctcgtggggttgtaggtggaggtaccgattaccttaaaaacacctctgtaacaaaagttatccgtgtatggactgagggttcaggagcacaggagtacaagcaaggtgaagacttccaattagtaaatggtcaagcaatatcttgggcacctacagggcaagagcctcctgcagggggaacctacttcgttcaatatgtttataataaaacaatgattgaaaatacagattacaaagttgtaattactggtgaaggtgatgctagggaatggtatatcgactttaacgagatgacaggttctaaaccagtcgatgaatcacttgttaacgtagactataaatacttcttagctcgtaaagacctaattgtattagaccataacgggaatttcactgtccataaaggacaacctaacgctttaagactagtagaggcacctaaccatgtagacccattagttttagctattggtacagtagtagtttacccagactcaaatactgctgatgctaaacaatggacaatcacacgtctaacaatggaagagctacagaagttatctgttcgtgtggaaaacatggagtataaccaagcagtgttctacttagaccaaccggcaatggcaggagaaaaccctatctatctacgtggagtattctcggatgcgtttatctcactagataaatatgacgttagtcacccagatgccacaattgcttttgactttgacacagcagaaataacattgccttatgcagaaattaataaaacagtcccaacaattatcgaaggttctagtgaagcacatgtgtggggtagactagtaacagcaccgtttaccgaagaagtaggtattagacaaccatttgctacggaagcaatgaacgttaacccatacaacacctttaacaaacagggcgccttaaagctaaacccttctgcagataactggattgaagatgaacgtatcacagttaccaaagaagaaacatctactatgagtgttcgtcaatggtggagacatggtggagcatcttggacaaacgatgagatgaacatggtatccaacatcacgctcgaccccggacaatcgtggggaggtgcctctggtacagaagaccaacgtaaacaagggctatccggttctactttaaccagtggtggtcagcaaaccaaagaatcaatgattgagtttatgagacaaattgatgttgaggtttacgcagagaacttgcaacctaatgctaataacctatacgtaacatttgacggcttgagagtacctgttaccccatcttctggttaccgtaaaggtgccacagaaggtactggtatggcaaatgcagacggaacatttaaaggggtatttaaaatacctgcaggagttcgttgtggtactcgtgaggtatctgttagaaacgatacgaacttagcaagtactacgttcactgcacaaggtacgttaaaaacaaccgaggatattatcataaaaacacatgttactattaacttggttgacccactggcacaatcattcagttttaacactaacagagttgcaacaagctttgacgtattctttgcatctaaggataacagtacaaatattatttgtcaagtacgtggaatatcagaaggtgggcaacctaacaaaactgtgtatgctgaaagagtgttaaaaccttctgaaataaaagtatcagatgatgcaagtgttcctacgaaaatcagctttgatgacccactaatgtgtaaagcaggtcaagaatactgtttagtattcattactgactctgataaatacacaatgtggattgcaactatgggtcaaaatagagtagacgaaccaacacaaacagtaacatcaaatccttacttggaaggtgtcctatatagttcatctaacgcaagtgcatggtctattcaccaactgtctgatttgaagttcactgtatacacggctaaatttaacgaagaagcggtacttgagttcgatgttatgaagaacgttaatgtagaccgcatagtgttaatgtctacctacctaactcctgcaaacactggttgtagatgggatatgaaactagtccttgataatgaacctgcaggtacaacagtagatgacaaaccttggttacctattgctaactacgtagacttagatgttaaccagttagctcgtgaggctaagcttagagcaacatttaaagctaaccaatacatctcaccaatgctatccttagacgacattatgttcgcagggtttttaacagcattgaaaggtagctatgtatctcgtacaatagacttaacagaggctccttacaacacggttaaaatgtcatatgaacaatttacacctgccggaactgttgtgactgctaaatacagtacagacgaaggtaaaacatggaagacatttacagtacagcctacaacaacacaacgtacacaagactttgttcgtgtagactatgttgaaaagattaatacgggtgggacatttaagtccattaaattccgtcttgatatgacgacccaaaactccttcctccgtccaagagtaagaagacttatgactaacatgacagataaatagcaacagaataagtataatagactctatatgttataatagacatatagagtctattttttttattaggaggaataaaattgccagaaacacacagacaaacaagctcaggtgcacttatatttaaaccaactatagctgagcaagaacataaaaatgctatggaatctataaaacaagagagaacagagctagagaaagaactggctaatgttaaagctatcaaagatgagttatcaaaagaactagcagacattaagcaactgaaagatgaattatcaaaatagtttctaaattgtcctatttaggatttctggttcccttatattattaactaatatatttaaataactatatataaaatatataatatataaataatatataataagactacaaaaaatatgaaataggacaaatcaactctgtatacaccttgacaactgcccgctatgtgatataatgaatatattgattatactaaggtgggtatgtcaaggagcatgtatactaatctaacttaaaggagatttattaataaatgagactagtagtagatattatgcatactcagataagatatgaagattcggaaaattatcttagaccagaaattcataaggtaatgcattcagaattaggagttaaagcagacggttatcaatttagtcctgcatataaagcaggttactgggatggtattattgattttttcgataaagaaaatgacacgtttcctacagggttactacctcatgtagaaacaatactagggaacctccaatcaactttatcaaagtcaggttatatttttcagtttgagataattgatgatagacctgatgagttcatgtcagtcgaggacatggataaggagatagtgcttaatggggataataatgacaagataacattaagggactatcaatatgaatctgtggagcaagttattaagaacagaataggtattgtaaacgttagtactggtggaggtaaaacagaaatagcatcagggcttatacaacaaataaccccttacctagagtcaggagaacgtattgcattttttacgaatagttcttctattttttcacagtcaattgaccgtattgagaaaagacttgggataaaggtaggcgcttttggtgcaggtaagaaagacattcagcaagtcacttttgtaatgatacctacgattgtatctgcaatatccgcagacccagaggctaaacttaagctgactgctaaagaaagaatgtacaagaaaattgctaaggatattgccccgaaatttgaaagagggtttaaccaaagaagtttgcttgagggatacctaaataattttcaagttaagacaaaagcagacttgcagttgaaacatgaactagaagaaattttttattcatgtggtacgaataagcaggttattatgaaaatgaaagggtaccaagcggaatatcaaaagattgttgaaaagaaaaatggtaaagttcttaagaagtataatgaggctatggagtttttagattccatatctgtaatgattgtggatgaggctcaccatacgagttcagatacttggtataaagtgttaacatcttgtaataacgctcagtatagaatggcacttactggttcgattgaccgtacaaatcatgtgctttggcaaagacttcaagctatattcggggagattacgaccaaggtgtctaacaacacactcattgagttaggtcactcagccaaacctaaaataacaatatttcctattatagctcctgtagatattcaaaccactacatatatggatgcctatcaaaaaggtatagtagacaatgaatatagaaattctcttattgcaaagttgactaagaagatgtatgataaaggtaatgggattttaattataattaatcgtatagagcacggagaggctattagtaacttgctaaaagaagagggagtagctcactactttatcaatggacaacttgaaaatgatttaagggatgaaaaaattcaggacatgcgtgatggagcacttaaagtaatgatttcttctacgattatagatgaaggtgtcgacatttcagggattgacacattaattcttggtgcaggaggtaagtccttaaggcagacactacaacgtgttggtcggggcttacgtaagaaaaaaacaggagaaaacaaagtagaagtattcgatttttatgatttaacaaacaaacatttgaaaaaacattcagagcagagaagaaaaatatatgaagatgagcaatttgaaattgttgatattcctattcctaaataactataataaagaaagggtggcatacaattgcaaagtccatgcctaaatattgaattaaaagaaaaatttaaattaaacaaaggtataacagacttcttagagagagttgcagataaatctcagagatggggtgaaacagtagcctcccctatccgtaaaacggatatggcaaaagagactggaaaaaaccctagaacaattacaagatatattaatcaattagaggaactaggtttaataaaaaccgaaacaaaaagaggaatgaatggagggactttagtcgtgtttaacacagatatgcttaattttgagccaaaggaaaatcctatcacgtctgatactaaacaagcaaaggagattagagaacaagtcttccctaaagccccaactaaagtaccaaaacgcagatatagaacaaaagcggagatagctgaggcacgtatacttagtgaaaaacttaaaaaacgtgaagacattttaaatgataaaattgagtttaacgttgttactagaagttttttcgacagttttgacgaaccagaagcgtactttaaaggctatttaatttcaagaatgtataatgcttatgtgacaatcattccttatgaaaaatataatagattgaaaaatttagatgagaaaaaggctaagcaacaactacgagcatacgaaagctcttacaattacgatgtgttgcctagaagatttgttggaacacctcagtacaaaaaatttgtagagctagctaaatattgtgaagagaataatatcaatcctttagtttatttaacagtgcaatttgatagaacagagtttttgatttctgtaggtaaagcacgagtaggagctacaccctatgtaaatactttgttatgtgcagaggctaaagaggcttacacaaatagaaaactgttctacagaatgttacagaaccaatatggattgtatacgtctatcaattcagaagctacttattatggtgcaacttatccaattatttcaggactattgaatgcttacaatatgccacagaaggacttgtcacagttagacactgctatttgtgacttagaatataaaaaagatattgacaaaaaagcaggtacgttgtactcttattatacagcaacacttaaatcgttagatgaatctgacgtatctagtgaagctaaagaaagtattgctaacttcttgaaagaacaagttgcaaacttttctagtaaacgtggactaacttcaacacagtatgccttagcattccctattcagataaactctgcacgcagtttattaatgaacgaggaagacgaagaactactttatttattgttaggtaaccagtcacgattatctaatgtaacaaatgatgaagctgaaatgtttattaaacaaggtagaaaattaagtatgtcttggtggggctcacagaacttctcaagaacaatgttcatgttagcggattactatgggtttaaaacaaatatatctaagttaggtatgtacattaaagaatttggtgaggagaaaattcctttagattctgtaggtatgttagacgtaaatagaatctatgatgttttaatgactgaacaagagattttagagattgacaaaagtaactgggagaaccaaaaagatatgcgtgacgacaaataagaaatataaatgggagagggacggatagtaagatgagtcaaattcaaaaacaagttatttatagagcattaagtgagccattctttgcaaaggaaattctaagtaaaattccaatggatgagtttaaagattctggatatgagatgattgtttctacaatcaacttatattacagaacacatgatgagagcttagaggaacagagtttattaacactagtagaagataagatgttaaaacaaaacaaaagtttggaagctcaaaacaaagtctttgaggtagttagcgacttatacgaactagagaacgaagatgtagactcagaagttatcagtgagaacattcagaactacgttcgtaaggtactaacacgagaagcaatcatgaaatctgtaacaaatgaaggcacactaggctctgatagtaatattcaacagctaatggatgacttgagagacattcttactatcgagacagcaggcaataattcagaattgctagacttcttcgatgacgtagataaaaagatggagttacttgcaaacttgcaacaaaacaaatacccaactggttttacagctattgatgctatttccgatggtggactagctcgtggagaagtcgggatggttgttgcgcctactggtggtggtaaaactacttgggcagttaaccaagctagaaactatgttgtacgtggtttaaatgttctttatgttcctttagaggaaaaagtagaccgtatgattgttcgttttgaacaattattatcacaacaaagtaagaagaatatcttagttgatggtgaattgaataaagacttgtatacccaaatccaacaagcgtatggagcgggtaaagaacagatgaattggggtaacctttggattcgtaaatataaaccacaagagctaacacctagcggtttatctcagttaatctccgatgtaatgattcgtaaaggacagcaaattgatgttgtcattattgactacccagatttaatgaaaaaccctcatgcaagcggaagtaatggtgaatcagatgcaggaggtaaactgtatgaagatattcgtgcgattgcacaagaatatgattttgtttgttggacgttatctcagttgaaccgagcaagctatggtcaagatattaaaaatgcaggagctatcgaaggctctaaacgtaaaatgaacgcagtagaacttatttttacattaaaccaaacatcagaggagtttagtaacggatatttgagagcttacgtagataagttacgtaataatagtgggattgcctatgataaaatgttgtattttaaagtactcccagaaactatgactattagagatgaaacaccagaagaacgagcagaacatgaagcactgttagcagataatgcgatgaatagagcaagtagccattccgatgagaataactacacagcaaacgatgttaataaaaagataagtaatttgaataataccctttcaggaggttggaattaatgaaacatattattaatttttcagattttcatatgcacttttttaaagatttttcaaaaccagacccagagtatggaactgatagggcaaaagagcaaattactatattagacaacttgatgaactatgcacgaaacaaaaatggggatgttttatttaatggggacatgttccataaacgagtatctattgatgttagaatatttaatatgttatttcaagtaattagtagttaccccgatgtcgatgttatcatggtcagtggtaatcatgataaggtaactaactctctatattcagatagtgctttagcaccatttagtgctttaccaaatgttacagtttgttctacgttaaacaagattgttaaagatgattatacgttgtacgctgttagctatggggaagaggtcgaagagatgaaagcttggataaaagaacaagctgataatttagaccatgaaacagttaatattctaagtgcacacattggtgtagatggttcatctactgggaagtactcccatacacttggtggtgcttttaaagtagctgatttataccctgacaagtttgacatagttacattaggtcactatcataaacgacaatttttgggaaacctgtctaatgtgttttatgtgggtaataccttacagacttcttttgcggacgaaggtcaagaaaaaggtttttatgatattactatagagggtaagaagtgggaacaaaaatttattaaaactgactatactccgtttgaaacagtaacagctgatagcccatcaacaacaggttctatggagaaatcttatatccagtttattggtaatgtggacgaggttgaggctgtaaagagaataaaagaagagaacaacttaagtaatattagaataaaagtccagaaggactaccatgttgagccacgtataaacataacagcaggttcgacacctagcgaagttgtcaatgcatttattagtaaaaagtaccctaacgcaaaaataattaaagacaaagccctcgactgtttgagaaaggcaatggaagtgtaataattgttcagcctagatatatctaggcttttttgcgttgtactattgactttattagtattttgaagtataatatgtttattgaaataattaattaatattttgggaggaaaagatgttaaagtttaaacgagttagcgcagagaactatatgtccattggctctgtatctattgatttagacaaccaaggactcgtacttatcgaaggtataaatgatacaaacgaaacatttcagagtaatggctcaggtaaaagtactttactgtctaccgttacttatgcattgtatggagctacccctagtggtttgaaagctgatgctgtaattaataaacaagcaaagaaaaacatgtcagtgattttagaatttgaaaaagatggggtaccatatcgtatcgaacgttatcgtaaacactctaaacataaaaatactactagatttttccaaggaacaaatgatataactcagaaatctgtagcagacactgacaaaaagattcaagatgtgttcggtattgattacctgacttatgctaatagtatcatgtatggtcagggtaacgtagaaatatttgctacagcaactgataagggtaaaaaacaaatcttagagaatttagccgatattggtgtttaccgatatgcacaggatgttgctaaagaaagagcacaaaaagcactagctcttgcagaagagctgaacagacagtacattgctaaaacatatgaaaaagatgggttaactcaatcttacaatagtgctttacaacaatacgagaatacagaaaagctgattcaacaaaaagagagtgagttagctaatgcagaattagctattaaacaaagtgagaagaatttatcagagggaagagcactacgtgaacccgaattagaaaagctaagagagcagatggcacaattaacttcccctgcagacgttcgtgaaattgatgtagaagttgaaacacagtattctaacgttagtagattgtctagtgcaaaaacacagaatgatactgctattgagaaattaaaaaaagaactagaagatgttaaaacaaatacaaattgctacctatgcggtgctttattgagcccacagcatagagaacaagaaattcaacgcattcaaagagaaatagcggataaagaagtgtttatcgaaaagcttaatagtgcattagcagtgtattcccctctgttagagcaagcaagagctaaacaagaggaagcaagaaaagctattcaagaacatactaatatttatcataaacttaatggtgaaatgaatgcgttgtatcatgagatagatacattagagaacacattgaacacatctattaataatagggacagcattaaggatatgttagcaagactacaagaaatacctaaacctcagtatgactatgacaaagaccgagaaatagaagatgaactaaataacattaatcaattaaagttagatgccgaagaagaagctagtcaatataaaactattgcacaagaaattttctctaataaaggcatacgctctgaggtacttgacctagttacacctttcttaaatgaaagagcaaaccattacttatctaccctttcaggttcagatattgaaataaactttagtacccaaacagagaaagcagatggtagtttagctgataagtttgacttagaggtagtgaatggctctggtggaaacacatatcaagcaaactccgagggagagaagaagagaattgatttagcaatatcttttgctattcaagatttagttcagtcaaaagcaaacattgctgttaatttaggtttgtacgatgagtgttttgatggtttagatgcaattggttgtgagaacgttattaaaatattgaaagaacgccaaaagaacattagtagtattttcgtaataactcactcggagaacttgaagccattgtttgagaacgtaatcactatgaaaaaagttcaaggtcgttcttaccttgaagaaagtaaataggtgattacatgaagatttatacattaagtagagaattaaacgaaggtactatatttgtacctacaagtagtagtaatgaagggaaactatttagcttcccattagagacactattcgattggtacccttgttgcccaagatatgagtatcagtatagtacttctcgaaaaaaactatatttgagattgttagactcagacaaaacattagtagctagatacggtgttggggataataaaaagagagttatttcaaaaatagcttgctttaatgagaatgaatggtataatgaagaagtggcaaatgagaatgcagagttgtttaactttgctgaacaatatgacattgttacacctttaaaagacgattatacattaaaagaagtagatgatagtatttctaaagtactggatattcttgatttactttatacaaaccaaaaagttaaagtagaggaagagctcataaataaagtagatactctacaattgagcaagccagactcagatgaacttaaacaagcgtataaggacatatctgagtatatgcggttagacagagaggaaaaggctacttatgtgttaagcaggtcactagactctttaaatagtgtttatgaaaaatttggtaatgtgtatacaatgttaaatattatgaggaaagtagtggcttaaatgtttacagacttgttatctaacgaattaggttcacctaaatatgcagtaagggactacaggtacaattgtcctttttgcgactacgatactaagtataagttttatgttagggtagaagaaggacacccaaagaataacttatggcattgttttaagtgcggtagttcaggtaacccagtatcttttgtaatgaagtattacaacgtgtcttttaaagaagcgctagagatattagaagaatatgactataggtttaataataaaaattatgtgcctaaatcagataagttaactgatgaggaatacttattacttcttctaggttcgttaggtaagccaaaagaagaaactaaacaagctaaaaaagagttagtcgcacccccattgccagatggttttaaactactaagccagaacctgagagagccagaagcataccctttcttattatactgtaataagaggggatttacattgaatgatatttacatacacaatattgggtatgtaaaggattcttgggtaccattagaaaatggtaagtcagtcagacttaaagaccacttagtttttttaactcatggaaaagatggcaagtatcaatattggaatactagagctattgggcaaagttttattaagtctttgaacgctccaagtaaagagggtgagcattcaaaaaaggatactatatttaatattaatagagctagtcaaaccccccagatagttataacagaaggtgttcctgatgcattaacagttggtgagtctggggtaggtacttttggtaagcaggtgactgacgagcaagttgaacttattttagatagtgtgaatgaagagcaaaaaatatttatctatttagataaagatgctaaaaaagaaattaagaagttagcagagaaactatataagagacataacgagacttatgtagttataagcccaacaactcaagatgcaaatagtctagggagagaagaggcttggaatattataaataactactctgtaaaagcagatggagtagggttaataaaattaatgttatagataggagagggaaaaaatgagatatacactagaagatttacatgcaggtatgaaattacgttgcacggacagtaaaaactacagtttttggactacgaataaaatctatgaagtaactaaaaaagagtcaggttcactatgtatttttgatgattatggaattgagagcctagatgaggacatcttagtacgtttaaatggtaatacagggaacgcagaatttgaggttgtttctaaggtgatgaaggatacagattacacagaagaagaccttgaagaagggatgttacttcactgcaaagatgctatgagctttccatggtgggctacaggacaaacctatgaaatctataagggtgaaaaaggaattttatttaccaagtcaggagacggtaaccaatactgtgctaaagaaatagtagctcgattaaatggtagtgcaagcgggtcttttgaattactagaaagaccacataaaacagagttagaaaagaaagtagaagcaagaattaaggaactaaaagaaaagaaacttcgtttattctacaagcaacaacaaattaagatagaagaaaacgaaatatctatagaaatcagtaagctaagtgaagcattaaaagcgattgacgtattaagagaatttgaataagaataactataggaggctaacaaggatgggaagagtatcagtatactttctaaatagcagaaatattatggatgaggatgagacaaagcgtacctatcatggaacatttaactcgatgaaagaagcagagcagtcagttcgtgactggtggaaagcaaatgactttaagtgtagtactcttagaattattgaaggtactgaggatgggattgttcgttgggactacggaaaccacactggattctatctatttgtaccagaaggtgctgtagtaaaatatacaatccgtgaaggcgctaagaaaccaaaacgaggaagagaaaatgatgtagcacatgacttattcacagcagacgatggagtagttattcccgggagattaggttcaaatgttatttctactggaataaaaacatcgtttgaccccaaacaatatggtttattcattaaccctcgaggtggtatgatgaaatatccaatcactttaggaaacacacaaggtgtagtggaaggggaatatcgtggagaggttggtttgccacttaagaatacattctctttacaattagatgcaagagctgtttctaagaacgttttaacaatcaatgaagaaggtaaacttattaacatcccagtgacagtagctcggtcaatgtatccaagctttagtgctctttatgaaaaacagctagagaagctaagtgaggagttacagctagtctatggaggagaagttagaatatctaatgctgatgagtatgtggttgcgggaacactatttatcccaaaaggcactcgtttatgtcaagctttcttactaccacgatacgacacacagtttgttgaagtatcagcgttaggcacaactgaacgaggagaaggcgcatatggttcatctggggtggtatagctatgctcatcccagaatttaagccaccattattgtacgttatgggtagcttttctgttatgttagaaaaacaccagtgcagtgtaacttttgatttaagagagccttatttaggtacctcttacgataaaatagtggagcttattaaaatgacttacccaaactatagcttaacttatgtagggatgacagataataaatataagttcacattaaagaataaggaggaccagcatgtacaccaagaaagaagaagtagtaacagttaaacacctagttgataaagagcaaattagagtaggggacatagtaggctacaaaaagactattagagggttcgatgcaaaaagagtaaaagacacactctcagtaacaaatcaaataggtgtagtttctcgtgtatgtgaagagtacattactgttcatgacttttttgataagtgctcacgagaaatatgggcaaagacatttgaaaatttagaagttcgcaaaatagaggatggtaacagcctactacggaggtatgaaaatgaatttcgttgattattttaatcagatgcagaatttagtgattgaagaaaaaacagatgagtatgttttactagagaaagaacatggtcaaaagtatgtgacatatcaagagctagaaggagcgttaagtacagtagcacgcaacactgcatttatggtagaaaattataaccttatgcaagatattaatttaaaaattgtattgaaaaaattaaaagacagtggtacaattacagaagagcttgaaaaagagattcttaaagagttcaaaaatattgaaagtttaatggaggacgaaacatatgagtaaagagagtaaacgcaacaaacgtatcggggagttatcggaagcagacatgagagtgtgggctgagtggttagccacagggcaggttcatgataaaaaccaccaaaaacagttagaacgcttaagtaaacgttcagtatcattatctgatgtaactactattgtcgaatttatgggcaaacggaatgatggttatatttcttctttaattgaacagcaggctgtatttgacaatttattaacaaaactaggtgtaacggaagaaaaccgcttagaggctaaggcagagtatgaaaaagagttgaatgctattcaagaaaaaatccaaaaagagttagagtctattaaagaaaataaagaaaaataatatgaaagaggttagctgaatgacagactacagcgcagtaggcaagaaaagtcgtaacaaaggcggacgttttgaacgtcaaatggctaaagaactcacagagtggtggggatatgagtttaaccgagtacctgcttctggggggcttcactgggcttctagtaataacgttgccggggacattgtagtccctagcgatgctaacttcccatttgttatagaatgtaaaaatcgtgaagactggacgattgaaaacttgttcttaaataacaaagaaattaagaactggtgggcgcaagttgtgggggatgcaaaagaaacgaaaaatatcccactacttatatttactagaaacagagcaaagaattttgttactatggcatataatgaaaaacttgttaatgagattgaaaaaagaggttaccctttgatggtctctaacataacatatgtagacgactacaaggatactcattgttacaagacatttactacagttttagatgcaataactagctttaagccttatggtagcaaagacaaagactactttttattttattttcctagtgactataactgggaagatagtctagtttatgaaacaaccataatggatgatgctaaacaaatggatgcagaggattcactagatgcactagttaattcttatttaggaggagaatagtatggctaaaacatatcaggaagctctagcaacagtacagtcgtatctcgaatcagatagtgtaatgaaagaaacctcaagtatatctgttagtttctcagctaactggacaggtgagcgggaagactacgttattgatacattgacatacgacattgatttacgagtattcagcttagaaactgcacatgttgtagctatagggaagaaactacctcaagatagcaatgagcatgctgaactccttaaaagacttaaaaaagaatttaaacaagcttctaaaaaactacgggaggactagagtagatgatagacaacgttaatagccctagtcattatacgcaaggagaaatagaggtaatagaggttatagaatatattactgctaagtaccctgcggaaattagataccatttaggaaatgttattaagtatatttgtcgagcacctttcaaggggaagctacaagaagaccttaacaaaagttcttggtacttgaaacgagcacaactggttttaacacagtcaccaagtagctatacaggtaaatgtaagaaatttttagagaatttcctatttaagaatagccatatcagagatgctcagctaatagaaattccagaagaacctattattgagaaatttttatttcaaacagcacagagttacaataaagaacagcaaaactatattatttcagccttaatggaattaaacagtaggtcaggtgatgtgaaaactgttcttgaaaatacagaaaactatttaaaatttattacaacttagtacaatataatgctctttctacgaaaagctatcttttatatttatggtataatagagatagggaaattaaaaagtagaaggagcattttataatgacaaaagcacccagagtgaaaagacttaatatttataacactgaccggtactttaatattaatttaatgaaaaaagaagatatagcaaaaaaaattaaagttaaccgattgaatgaagaagagatagagagggagatggatgaactagcaaacaacccattgaagacccctataggttacatggatagaacaaatgaaaaatcttatatactttatcaagaaaagtatacgaacgacagacttattcagaaattatttaaacatgcgggctctgtgtcctattacacagatacaatcgtaccatactacataattgagcaaatatctaagaatttaacaagtgaagtaatctatcctataaaaaatagctatgagaacagagagattgaaaatgttcaactagctttcactgcctgccctgtaacgattgattgcccagtagtgctacctgatgttagcccgtatgatgtgttatttgcactacaccctttaaaaacaaatgtagacaagattcaaatatcgtttccttgtcttacagaagaagagttcgataccagacatgaagaatactaccataaagtaggtaatcactatgaggttaaatcagagtacaaatataaattctttaagtatgtacagacttctttatctatttgggctatgaacatttggttagtgtgcgatagtgatgaggactacaataaaatagacagatatattcagaaagaaaaaattaaacgtaatgctaacagagagcgtgcattaaagagaaagggtaatcaggatgagtaaagataaaacgattaaccgaacagacatagctcgaacaatctctcaccatactggttatcgaatgaaagatatattgaagattttagaagtagaagatgaagtagtagctcaagcagtatcacaaggtatctctgtaaagaatcacaaattatggaaactaaacattaaaaaaaagccagagaaggtagcatgggatggtataaactctaaaagttttatacaacctgaaaaatatgtagttaaatttgtaccattatccaagttgaaagagtcaatagacacttataataaagagagcaaataaagctctcttttttgctctttctatattgacaaataacataatacaaagtatactagtgtcatagagcaacagagaggagaaaagtgtaattgaaaattctattcttacaagagtacattagagaaaatcatgtccataatggaaagaacggacaaacagttgattttaaaagaacagaaatgggtaaaaaactcacaggtctgttaaatacaatagggctgacaggtagggactatgctgtagactatgtgtacgacatgattccggaagtacagaaagttaaccctagaacaggtaaaccaattaagtataagacacctacgttaagacagcgtaaagaaccagaggaacggttactcagacgtttaatgaaatacaaaccagatattatcatcccaatgggggagatgggttgtaaaaatttattagggagtacttctatcacaaagaatagaggagtaccaactaagaaaacaattacgaatgagaacatactgagaacggctgatgagcagggacttgaggtagacgaagtagtagactcttttgaaacttgggtactacctatgtttagtatggaatactggacagctaacccaaacattgagaactttatcatggcggatattgatacattgggtaagtttgttcaagaaggggaacaagcatttatacctaaaaaagtagattacgaatttgttgataacattgaacgtgtaagacaaattttcggttttttagacaaaacgaagccagtaactgcatgggacttggagacaaatagtttacgtggtgacttattaggagctaagcctcttgtaatgtctatgagttggctagaggggcaaggtgtgactataccgttagagcaccatgaagctaaatggagcccagaagaacttaacgaaatatatgacttatttgagaagtttttagcggacagacagcaaccaaaagtaggacaaaatattcagttcgatattagattcttaatgagcacaaaaggatttaaagagtttgaagacaacagagatacaaaaattgcttactatctaattgtttctcagaaagtagatacttcaaaacggctatccgatattgcatatgaattaacagatatgggaggctatgatgaaccgttagagcagtataaaaaacaatataaagaggactatattgctcgtaagaaagcagagattgatgctttcaaagaagctgaaaaagaacgagtagagtgtgagttcaagatagcaatggatagatataagcaagaagttaaagaagctaagcttattggtaaacctactaagtccattattaaaccagtaaaagaaaaagttgtagtacctaagaaatcggatattaaacttattaatgagattgatggtggtaactttaactacgactggattccattagaaattatgcacccatatgctagtggagatgtcgattgctgtctacgtatctataatgttctatataaacgaattgaggaacatcctaagatgttggaattatggctaggcttttatcctagattaacagcaacattagcacacatcgaggcttctggtgttctactagactctgaatacgcagaattagtagagaatatctatacagaagaagaacatcggttgcttaatgaaattagaaagctaccagaagtaaaagaagtagaagatgaacatatgatgttctacaaagaggggcttaaagaaatgacaaagcctgtcaaagatagagatgcctctgttgccagactacgagataaatataaaattactgatagtgagaacaaagtacattttaaaccaagttcgtctgaacataaaggtagactgctatttaaagtaatgggacttacactaccttatgataaagaatctattaaaaaagaaacttttgacaatggggtaccagaacatcagctaacatggagagattataaaacagataaacatgcactagcttatattgcagaaaattatccagaggctaaacatgttgctgaacttttgctagagtattctaaagtaaacacactaaaaaataactttgctcaaaagttacctaaattagcatctaacaaagatggtatgattcatggttcatataacagtaccggtacagaatctacacgattgagtgcaaacaacccaaatatgcaacaattaagtagtaaggttggagaccctagacgttttgactataaatacccaattaaacgtttatttagaacaagatttgagggaggtggaatgctacaactagactactccgccctagaaatgcgtattttaggtttgattgcaaaagataaagcaatgacacaagcgtttattaatggtgaagatatgcatgaggcaactgcatcgcttgtatggaagttacctaaagataatgtaccaaaagatatgcgacaacgtgcaaagagtgtcaacttcggtattgcatacggtaaacacaattgccgtcttgtagcgtaagctactcgattaaacttacctaaacgggcatagctgaataaccaataagctgataagagaacctaagtcctgaaaaggatagaggcaatcccgtgctaagttgctatagtaaaagaagagtgtaggtagctagaatacttacagggtaatgacgtatgtggtgtactggtaagcactgcatatctgaacctttatagggttatgtgtgaactcctcaaaccagtaaagaaaacacactatagcataaatgccgaacgactatcgaaaagtgagtagctgtcgagaggacacctacaatataactgagtagagtacaccaacaggtggaaatggtaaggctcctagagtaacgactaggagcgtgatatagtctaagcccctaataaatatcgggaaaccgagggtataactggaaagtcctttttcaattgcgcctaagttaggtgtaactgtagaagaagcagagcgtatttttgaagagtattttgcaagtaagccaagtattaaacaatttattgaagagacacatcaatttgctcaacgttatggctacgtagaaacactacaaggacatcgtagactattgcgtgactcattctctaaagataagaaagtatttaatggcgcaatgcgtaaatcagtaaatacaatcattcaaggaactggtgcctacttaactaacctatcaatggtatacattgacgagtatatcagaaaacacaataagcgttcacgtattgttatcactgtacatgactcacttgttattgattgcccacgtgatgaagtggacgagatggcaaaagtggctaaatatattatggagaacttgccaattgatttcttaatgattgagtgggaaggtaaagagatgcgttaccctattgtggcagatgtagagattggggagaattacaatgatatggttgattatgatgcagaaattatcaacgagtttgcttcttaccgaggatacgtaaaatacttcaaagaccaagctaagattaaagattactatgataacaaacttatctcagaagagcaaaaagaccaaggtatcaaagttatccaagatgcaatagagtcatataaacaaatgacaatttaataaaaaaatgttaaaaatagcttgactattgacgtatagtatgttattataatatggcagacaagttttctgtattaatacaagaagggggagttagagagtgtgcttaatttacgagtagatgatttagagttcaaaacaattaaaattattgatgataacggagaagttgtgacacatgatttacaaacagagttacaagtcaatgaatttaatgtgagaacagcatttttagagcaacctgctaagtatacttattggacttcgatactagagcgcttgcgcatgtatcaagaaaactatgagttaaaagcagagaagaagaaagcagaactatatgagccttctcgggttgccttaatcaatcaaggagtagctaaacctacaaaagaccagattgaggcacagattatgttagatgaagactattacaaacttagacagagtatagttaacctatcatttaacgtgagacaactgcaatatatagttaaagcttttgaacaaagaaaagatatgcttattcagtatggagcagaccttcgtagggaatatgagtatagccaaaaggttagtatgccagacccaatgaaaaataaggtaaataatggtttctcagactttcaatggaatttagaacagtaaaattagtgataaaaaaaataatataatataaaaaaatagaaatggagaaatttaaatgaattttcaagaacaattacaacaacaattaaaacaacaaaatattggagaacgtgaagcggtagactacccatcaaatcatttaaaacataaagaattatacttccctaaagcagaaaatggtcaaccatcaactctatatgtacgtgtgttacctcctgcagtaccgggagaaaactataatgttagcgctcgtgaggcattcttaacaactcgtaatcgtaatggtaaagatttaaagagcaactttatcttttcagaacaccctaatgcagaagacatcttagaacaagctatgattcgttggaacgcagaaaatcgtgtaccaaacccttatagccgtaatacaaaacctcgtcaacgttactacgttaacgtagtgcagttaattattaaccaacaaacaggagaagttagctacgaaacagattctaatggtcagctaatggttcgtttacttaagttaccacaaacagcttgcatggctattaatgagagcttaagtaacccaatgttacgtccacagttttcacctgatgtaccagaagaagtagcacaatacagcttcatctcttctgcagatgcgttccctatttcaattacaaaaccaccacgtagtaacaaacctacttcgtacaatgtacaagtgattagtaatcgtagcttaggtgcattaccacaaggttgggaaaacttattagaagacttgaaataccaagctacaccttctgtagagtataatcgtgagtttattgagtactttattgatgtagtagacgggaaagaacctgtgcatcaaggagctcaaagtcaaggaacccaagctccacaatttaatcagcaaccagtacagcctcaatttaatcaacagcctgtacaaccacaatttaaccaacaacctgtacaaccaatgcaacaaaatactggttggtcgccacagcaaagccaaccacaacaacctgctacaggttttaacgcaacgaacatggggacacctccaaacattaatggagggtttaaccaacaacctgtacaacaacctgtacaacagcaacaaccgatgggttctttcaatgaacaaccagtgacagacccttccaccatttctgatgcggatatgcctttcaatatgcagtccatgcctgatgtatcaccacaacaaaatgctgtacctgagcaacctgtgactaatacaccagagccagtcagccaaccagttgttaaccaacagccaaataacacacctagtgtagacgacctattagcaggtatggtaggcaacgtttaacaataatgaaacagttaggaggggcatactgccccttttaattctgtgttaactatccaaaatatttagtaggagtgaataatattggcaagaaaaagaaaaagtgaagaaatagattttggaactatcgatttgacaaaagaggtagggctaactacatttacggacacaaagttctctaatgtatcagacagactaccaacaatgattccacaacttgattacattttaggtggaggattgccatttggacgtatggtcgaggtctttggtaagaactctagtggtaagtccactttagcagttcatctgacaaaggtagcacagatgctagatgtaccaactgtatggattgacgttgagggtaccgcagacccagaacgcttagcagaattaggagtagactttagtgcaggcggggtattcatggtagaacctaaacagaacaaagacggtagtaaggatacaatcacggtagaacgtgtagcagaagagttacaacgacttctaccagtattcagtaagcttggaaaacctgtattaattatttgggactcggtagcgcaaacagcttctgagaaagagttagaaaaaggtgtaggtaaccaacagcccggaattaaggcaaaagcaatggcacagtttgctcaaatcattgcacctttaatgacaaactcaaaagcattatttattgctattaaccaagcacgtgatgagctaggtagtatgtttggtggagtagattcccccggaggacacgccttacatcactgggctagcttacgattagaagtagttaaagcaagtcagattaagaataaagagctgaatgcattcggtgcggaggaagagacttatgtagggcatattctacgtgttaaaacggcaaaatcaaaagtgtctcgtcctaatcaaaaagcggaaatgtatttaatgtcagatacaggtctgaacttagaggaaaacatttatcgttcatgttttgcaactaataagcagtatgctttgattagtggaggcacatggaagtcttatacaacggatgcaggacaagagattaaattcaattcagacaaagcttgggtggcttatttacgttcagaagagggaagacctgttcgagacgaactatttgctaaaatgatggtacgctcattcccacatcgttatgccccatttaataatgaggacgtggacgtatgcaaaattccattatatgaatttactaaagaatatatggaaaatcataaggaacaacctaaccaagctactaaagaagaagtccccgaaacaggaacagatgtttcagatttacttaaacaggtagactaacagataagggggcaattagcccctttattagctataaaggagaggaacttattttgcgcaaaggactagcacctaacccattttttgaaatattagaaaaacatcaagactcctctaaacgtactatgactatgaacaacagtggtacacctagttcactacaaccaataagagatatgttcttaaaggcaatgagagaaggtaagagagtcctaatagagaactctgacttaagtagtgcgaactctgttgttatagagatagaatatgtaggtaatcgttggtgtttaggttatcaacgagtcttattttatggtatggagttaaaaataccacacactatccacttctgcgatgtatatggagcctacgggcacgatgctcagaaggttaagagacaagttaaggtagtgttcgagggggacaacccttttgagtagagatgttcaaaaagaggaaaaagaaatacgtaatggtaatcggtttattacagagactcatggaaaaggagtgtttcctagagatgtagaccgattgtatcataagtatagtaaccttagatataaagtctataacactcataaagattcgttcaatagtgaggcttcacgtaaggagctcaagagctatattgatgagcaatttataaagttaacaaaagagtatgatataaatggagaggtagactttccgggatatattaaaaaagctctgaatttacgagtaaggcacagctatgtaaaaggacggttccgagataccgctagagaacgtctaggcacccaagataacgaagtagagttattgttagggattgacgatagctctcaggcagatattgaggatgcagaacttattgaatcgttattatcaaaagccaatttttcagaaattgaattagcagtatttcagcagttaattcaaggaacagtaagggatgctcgtattattactgaattgtcagaaaactacggggtgtctaagaaagccgtaaaagatgctataaaaaatgttcgtgagtttgtcttaataaatttaacagattagagtaatacctcctttatgtctgctatattagcagtagaaacataaaggaggtattttttagtggaacaaaacaacactggcaagtatgcaccatttattcgtttaattgtgatgggaatctcatttgtggcaactggtttgactacaatatttggttgggaacctttaccattcacagacgaacaaatgaaccaaggtttaatgttagtactatctgtaggtcttgccatctacaactggtacaaaaacaacgctgtaacttcttatggtaaagcaaaagaagaagcaggaaaagaagtagtcggaactagacaagacttcaaaaacagagactaagtacgaggggtgtaacccctccttagttaatacaaaggagcttcgacatgaagatagacgagataagcaaattagaattgcctaatctatttggaaaattccttgtggtagagactatttcggatgggtacactggaaccgtatctggtcactataactacgagatagaccaaaaatctgaggaaacttatatttaccctgtattttggaatgataagcttaacaaatttattaggtcagatgaattagttgtatacactaataaaaataaagtatactatgtttgtaaaacaactatagacccatataatcatgcagtagtagatgagctcacagtagaggaaggtatggacaaagataagcgtacccttcaagcgtttaaactttttgtaaatgacctattctcatttggtagctacaatatctttctaacaggtaacctatcattagaaaataaccctgatattgttctagttagtagtgtatcattaaacaaacagaccgctaaaatgtacacagaacggacattagaactaactgctacgattctaccagagggtgctacaaacaaaaaagttagtttctcagtagataaaccagaactattagggttaacagtctctgacaataaagcaactgtcacaagtaaagataaggcaggtactgcaattgttaccgtaactactgaggacggagaccacactgacaagtgtacaattcagataaaagaatacataaaagttacaggaattaatgttagtggagaatctgctttagaaaaaggcaagacgtacaaatttactgctagtattgtacctgatactgcaacgaatcctaaatttacttggtcttctagtaatgacaccatagctagtgttaacgcaagtggtgacgttgtagctttagcattaggtgaagcagacattatagcaacaactgaggaaggtagccatgtaggtaaggtacatgttaccgtatcagacccagaaccagtagaaccaactgaataacatagaaaagaggaaagaaaatggctaaagaaatattaaatattgaagacctgttaaaaccagagacactagaagtagcaatagatggtaaataccttattgtaccaacattgtcggatgggtttacaggtacagtagcaggtggatatgcatatgctgttacaaaaaaaggaacagactatacagttaacgaattaatttataaccaaaaggataatacatttaaaccttctgatgaaccgattattataactgatgataatgaaatattcttcattactcgtacattagaagacccatataattaccctgtagttgctacagagaaacttaaaactaaagatgtaaaagaaaaacaagttttacaagcgttcttagcatttgctgatgacagatttaagttaggtgtttacaatgtgttcttagcagatgaaccatttgtgtatggggacaaaacagaatagtttcattataagagacccgttaaggtctcttttttttgtatatagtgttgacaatgttgtagtttagttatatactatacttatactgtataaggaggtaaccacatgaacgacaataaggaaaaatgtattaaacaaggaatacgaaatacttataaagggtacgatattttattagatgaagagaatggatttttctatgttagcgtacttgacccagatggcaaagaaatcattagtgggtttgtagaggcggataaacctattgaagaatactataaagagctcctaagtaaatgcgaccaagacatattattcaaagaccttttaagacccttaaatggacgtagagacactgaacgtacagacatacgtttttttaaaaagagatggtggggtataagtaaatgacaaagataaaacttattacaaaaaaaaataagagaggtcagcacaatatgggaaaaaagttagaattaaataagattcacaaaatttcttgggagaaggggttttcaagcctagacgacggttcaatagacctaattataacgtcacctccatataatctaggaggcagatttcatacaggtaacactgtatataaagcttacaacacatacaatgataatatcccagaaaaagaatatcagcaaaaccagatagatttcttaaatgcttgttacgacaaattagaggaaaatgggagcttgttttacaaccataaacctagaataaaaaatggggtgtgtactcacccattggagtggatacttcaatcaaaatttattttgaaacaagagattgtttggaggaatggaggtcagaatttcgataaaataagattttaccctctaaccgagagagtatattggctagttaagaatccaaaaacaaaactgcataatgctttaggtttatctgatatatgggagtttaagaacagaaagagacataaaatccataaagcaacattcccaattgagctacccaaatcaataatttcatgttttcctaacgctaaaacaatactagacccatatatgggtgttggtacgactgcaaaagctgtaattgaattgaataagcaagatggtggaaacagagatttcttaggatttgaaattgacgaactttatataaatgatttttataaagaaattacagaagataacaaacttattgataataactagagataaacagtggggtataattaaatgacaaagataaaacttattacaaaaaagaacacccaaggctatgtcatgaacacgctgttacgcaggttctataaggacattgtagatgtagaatttcttaataaattcaatctacctgatattcacaaccatataggagaatatgatgctgttattatagcagggtttcctttctttgaaagccaacgaggtgcattagatacagcattatcatctatggataacccatttagcaaggtgtaccatttagcaacatttggagacacctatcgtaatgagggtagttttcgttcatttgtagatgaagttgtaagccctgttggacacttttcagagttgataatcgacttagttaagttcactaacacaggtacaaaagaggacgaggataaggtaatagcgcttgctaaaactatgctagacttttctaaagatattatagaagagacagacaactacaatcgttatgaagtaacagacagaactatctcttgggttcttcttgtagatttgcttggagaaaatctttataaggtagcagaaccttgtaaagagctaggcactatcttgaaagaacaagaagtacttgtagatgccttgaacataaatatgcaggactatgtgctaagaacaatagggaagatgtctgcaaacgtcattaatggaacagtggtttgttttggttatgcagaacagcatgttaacgaagtagcccataaattaattaatttttataagtcacataactatcaaaaagttattgtctttattggtagacacacaaaaggtgacgacatgtttagtgtaaggagctatggtgtgaatgccggagaggttgtctataaagttcataatggtaaagggaaagatacaacggcaaccgtcttcttaggtaaacctagtgaagctgtaaataacacactgttaagtgtgctttctgaaatcttatagtttaactttgtggtataataaagatagataaattttgataggagtgtaaatttttgaaaaacaacgaacctttagagaagttattagacaaattagatgaaccaagaattttacaaacaattattataggtagtttacaacggagctttaatcgagtacacgttggtaaatttaataaactagcacaggagtttgacttagataaggagaacctgtatagcttaaaggcactagttaaggaaattgaagaagataaagagttacacgaactttacgaagctagcatggcaggcaaaattacgctagaggctgttcgtaaagtattgttacaagatgataaatcatcgtttgatgtactgtcttcttacgtagtagagaatcaagcagtgctagcccgtaaccgagagttcggtaagttacaacgtgagggagcttatcttgaccatttaattagtggtttgaaaacatacttattagctgaactaaaagacatgtctagtttaaaatatatcaataaaaatttaaaggcaccgaaagtatcctcagaccgagaacttattctgtgcctatccgactggcatattggtgcttttgttaataacattgacacaggtggatacaactttgaaatctttaaagaacgacttgaaaagttattagaagaagtattccaagtggctatggaacaggatattaagaaaattcatgtttaccatattggggatattattgaacacattaatatgcgtaatgttaaccaagcatttgaagcggagtttcctgctacggaacagattgctaaaggaattagagttcttgctgatacacttaatttactagctaaggcagaatttgaagtgtctttcggtatggttggtggtaaccacgaccgtttccaaggtaacaaaaatgataaaattcataatgataatgtggcttatcttgtagtagaccaacttcatttcttacaagaattaggggcgttaaacaaagatattaaacttgtagacaacagaagtgatgtttatagttttaaagatacagttgcagggaaacgtattaaagtaacgcatggtgacactgagggcaaaaaagtagatgttaaaatccctaaacatatcaaagatgaagttattgactacctaatcatgggacacattcatacaacacgtattattcaagaagacttttcaagattccatgtgtatgttggctctcctatgggggcaaataactactcagcagagaataacttgccaacaacaagccctgcacagctaattatggtattagaccctgagcgtgatacaccacaattcatgccagtattcttataggaggtacctgtatggaaggtaatttagtttatattttattggctattgcatatgtaggtgaaggtataactgcctttactaatactaagcgtaaagaaagatacatgattgaagaaggagaggctcctttgccacgtagctcttatgtatttttaggtattaactaccttttaagaatagctatagcaatttctcttatcttcatcataccaactagcttgcaacttaacgtaacaggtattgctttgttcacactaatggtatttgtagttccttttatagcaagaattatcgaagttgttattagaactgcaattgttcgttatgttcaaaaacaatatattaagcagttagaagaacgaaaaggtaaaagagagactaactagtctcttttttgctatattgaataatgaggtgactaagtatgaattttacagaagtaataagccctaatggggagacatcattaatagatgtaaacaacccaccaacattaatcagacgtggggtcttatctattaaaacaaaggttaataatgaagtgaaggaaacccctgtctatattgttgaactagctgaggagctaacgggtactgatgtagtatctgtctataaagtaaaagagattggagattctatccaaaaagactacattgaagaaaaagtgacccctaggttcaaaagcacaacatatctgggtgaactagcgcaaaagattaaaggacggtcgataaaggaacaacgaagagttgaaacaaaaccaccgttattcctagcaccagtagttaatggaattgatacattcacaggaatcgaaggtaagggtttctacgaacgtgaagaggacagacatattctactacctgatggaaaaccgggcatagcctatggagataatacaggggtttttatcggtttgagctcgattaagtgggacaaggcatatgtagacgtggagtctataacaaagggttatttgtcacagaaacagatatggtttaacctagatggtcaaagaccgcaatttagaagtgagacactataatgacagataaacaattttatgaggcagatattcaagaattaattttaaataagcaaagaatattcggagacataggaaagagtgctatcgtttttgagaaagcaatcatgcaaggtaatacaatatgcgattgcctagtcttcacagaaaaacgaggactcattggcatagagataaaaactgagcgtgactcgacaaaaaggttgaataaacaactatctgattatgaaaaggtgtgtgactatgtatatgtattatgccacgacaaccatgtacctaaagtagaacaaatacttactagacataatcataagcacgtaggtattctagcttacacagagttcatgggagaggcaatgttaggtgagtataaacaacctagccgttcccctaaaaaatcagcttatcatatgttaaatatcttgtggaaagaagatttaataagaatgcttggtacattcagacggtatggtgataggctagaagctaatggagctaaggttatgaaaacaaacagccgttctggtggggtatctgggctttatgttaaatctacgactgctagaagaatgactaaacctgaactcattaataatttaataaatagagtaggcggtaccgaagaggctacgagagtgttctgtgatgtgtttatccataataggaatcacccagagaaagcaattaagttaagacattttaaagcaaaagagaataggggtgacctagatggggtttaaaggtgcaaaatatggttcttggaatactgtagttggtaagaactatgtaggtactgggggcagaacaagtggtagtaacacaaaacggctgtccacaaaaggctactaccaagtaggatttgttaaagaatatcagaacttgacagaaaaagatattatgttaaaattagagtatggaaaagacttagtgtctagttacactggtgtacctgcagatatgattaagctacgtaagaagaaagaggagcaaaccctagcatctttagacacagtttattatgttagcattggtaaggaacctgtaggtaagctgtctatacgagctcagagacgttttagagaggtagggttaacatttatatacctagagaagaactacgtacagaggaagcttagaggcggtaatgtacgtagtgtagggtatactaacgcaaccaaatctcagaaacgtaaagcagatagacggaagagcaataagtctaaaacaactagatagatggaggactactatgagtatttatgatgagctaattggtaaaagtgttatagccctagaatatgcggaggatggatgtgaggcaagccttgtactaaatgatgggtcatgcttaaaagtatcttgtaacccagagccagactgttgtggttataacgattttgaagttattcttccagatggttttgatttcacagataacattattacaaaagttgaagataatagtgaagaatgttacggtggttcaacagttaggataggtatttttaccaatgatgcacggatagctattgaaggggactacggaagtggttctgggtggaactatggagagtatgtagacgtagaaattgtaaaataatttactattagatggaggtaagctatgcttaaaaaagggaaagaagtaacactaagaaaattttataatattatcacagataaggaatcagtattactaggggcacgctacacaagctcaataatgactacagatattcctattacaacaacttttgaagatgttgaggtagaccttaagaaagaaacagttgcaggaactatttcattcagaccagtaggagaaagacagattaatgcattaagtttactaaaagaagcaagcacagcttatggaggttatggagagttcctagatgatactattgagaaacctttaatcaatagtgattttgcagtagatgttagcctagcagactctgctttctctaacctacaagagattccatttaacctatatatgtcctctccaaaagttttttatacagaagtatcaattagagggcgtaaacatatgcaatatgtattagaggatgagtcttctagcggtgtaacaagtacgttagcactggtattccgtaaaaaattgtatgatggggaaacattgctaggtgtgcatacttacaccgaagcactagcaagagtagagggaattaaagtattacagtttatcgcaaacggttctgtactagaacaagtagtcggtgcagtgtctgttttagggggtagcacaggaacaaccctgttccctatgtttgacgatatggtgatgcaatttgtgatgattgagtctgttccttgggtgcacatttcttgtgatacaggagcaattgcttttaaggaggaagacatccgcaatgtaaccattaagtcagctagaccgggagaatataaggtgactatctacttgctagacgaaaaagttacattattaattggataaaattttaaaggaagttgacaatatatgttgacttccttttttgtatatgctaagataactacagttggataaaaaataaatggtatagagggagagatttaacatggactacaaaacaaaggtatatgtaggagcgcttagttggttaggtactttaggagagaaacgatatttagggcaaatgcgtgatgtattagctgtgtacgagctaggtagtcgatacgcaggttactatacagaagatagtgattatgactatatggttgtatacatgccggctccttatgatttaatgcatcctacaacaatctataaacaggaaacagagattgatggaaataaggtagaggtaaaatatatgtctatcgtggaatatgtttaccgtattgaaaatggagatttagaggctttacaaatgctaaatgccacaagctcccaaagtttcttcggagagtctattgaaggtattgacaataagcgtactcgtttagttacgtatatgaaagagctagaatacagaagagaaacatttacttatttagcaccagagaaattgtttagaggaattaatggtcgtattaaagccacaaaagcacgtatggataaggctattgagaatgacgatatggaagtagcggtaaaatgtgctatccttattcgttattttatggacttactagttgtgctagcggacggggaatctattcgtgaaggtcttacgttctctcctattattgcaaatatcattagagagtttagggaagactgtgagtcagcacaggctaagacacttatcagtactgcacaagtgctattagaggcggatagagaagagattttaaatagtattaaagaccatgggttatcagatggttacgctcaatcagttagacaatatagtttaacaggtcgattgatagatgtactattaggaggatattatgattaagttagaacaaaataaagaaatcttagatatatttaatagaaaaggaaaagtaacagataaagtagaagaatctgccaaaattatgctagaattagaccacgattatgactttggtacaggagacattgcttatacagagcgtggcacagataagaaaggacgtttctacctagaaagtcacttgtttatccataagattatgccttatgggttcatcttaaatgcggtagtaagtaaagtacactatggagaccaagaggagaccttagaacgagaggtatctcgtgtatatgagctagaatataacctacgagataaggtagctgtgctgattaagaatggtaaaccactaaacttctcagaaaataacattagtaacatgttttctgggcacgtagcaaagaatattcttgaacaattagatacaatgtctggttcagatatgtatgtgtccgtgtatgaacgagttagtcgggtgaaagacgaacaaatcggtaaagtatctcgtttctttgaccgattgatgaagtataacaagattgaattaatttacaagagcggtgtccctaaagactttgctttggcttacgcttatcgagtagttgttgtaggtgaagggaaaagtagaaataaatggtatgaacctataaagaatgtgagctatttagacaaggaacaaacaaatccgactaagcacttaggtatcccaaagtctatcttcaagattatttgtgaaggcggactagagtggacattctaccaaaaaatggctagtcgtttccataagtcagtggataacagaagtattgtaaaaacccctgaatctcctactgctatgaagaaggcagagaaagaggttgctaagctacgacaagcctatgctcgttttggtggggtattgtacaacctttatcagtttactaaagaactagacgaacaatatggtatctctcgtagtaaagatattatccaaatagagtgggaacctatatacgaccatattattgcaggagtagttaacgatgaatataacagtacaactacttatgatatttctatggttgcaaacctagacttctatagaactgttcgttatctctactatcaagtatacgttgagcaaggacttacttcacaagcagagtctaggtacacatacagagactacttgagagcacaccattatatgaatgcggtacctgttaagtaccctaaagctcttaagactgctcatgacattattaatatgaattaccgaacaatgaaagatgaggtattgaataataactttgcaagtagcgtagctaaatataaagatttagaagaagtatcagttagaggtaactatattgttaaagttcctgatagtgtggaagacttaactaaagaaggttctagtttacaccactgtgttgctacttatgctcgtcaagtggcagaaggttctactcgtattttgtttatgagagacaagcaagagccagacactagtctagttacttttgaggtaaaaaataataaactagtacaagcaaggggactagctaaccgtgaattgacaaataaggagcaagagttcttagacaaatggctagtcaaagcagaaattggtaagtactcatttgtttaaaaaggtgaaatatgaggtgtgtatagaccaattcacaatgaaaaaagtacactaaacagttgttatttcattattaggtaaaacaacttattttagatagctgatattgaccgacaaatatttcataatgatttagctgttaaagttacaaaaaccctactaatatgtggggtttttgcttgtttcaattacatatgaaattttacagatgttctgctatattagttacagaagctaataaaacaaagggtttcgacccttaaaaatgatatttcatataattaaaagttgaaggagtttataactaaaatggctaaaaaagaagtgaataacagttcagtattactgaatctatacaataataaattgcttgtatctaaggtagacgaggcgttagacgagggtaaaccatacgatttcattattgctttttgtaaagagaagttcgattttgaaattaataaacccgcattatctaggtacaaagagaaacgaagagagtctttagaaacaggagtagacttggaatcactacttgacaaacgtagaaaatcaggtaaaattattgatattaagtctaaagaggtaacaccacttcctaatgaaacatacgataacacattcgggcaagtggaacagatatacaatgatgtagaggtgttagacacaatcatacaaaaaggttttaactctctaaaagaggtagactatgttgaagccccacttgctatgaaagcaattgaagtaaaagctaagataacagctaaccagttccaaggtctaagtctaacaggtttaagagagctaagattaagacagtctgctaaagaacaagcaatgactgagattattctacagtttattccagaagaacagcatgaagaggtattcaacgcaattgaatcagcagagaaagagttctatgaaaacttagatttaacagaggaagaccaaagaatcactaaagcgttgcaagcatcaggtatggatataatttaggagggttataatggttgaaaatttgagagaggtaaattataaaacgttaaccttagaagaaagtttacatgcattacttgaagggaagacccttattgtaaaagggctagaacaaagacgtaagttagatgtgctagtaaggattttctcagaaggtgttgtacctgttacgcagataagttatgatacaacccctgcggatggttattggagaacaggatattggcagatatacgatttgccaattaatgcccttagcacatacccatgttttatctatgatgatttaaatacggatgaactccctaaatttatgataggggacactgtttactacacaagtaaagaggactctatcaaagattccgccattgtaatcagtgtatacaaagacgatgctaacaataagtggtactacaagttaagtagagataacgaaatatatgcagagagtgagattagaagagacaggttgtaagcctgcctcttttttttttaaatttattgttgacaaatatctataactttgttatagtataaatatcaaggatattgataataaattttggaggtgccatgatggcaaatattttagacacattaaagtggttagataaaggggacaaagttactattgaatttgataaagagcggtcgaagtatgcaaaactgactttgcacgattcatcagctaagacaaatattgtccgtaacattgttttttatgatttagacaaaggagtgtatgcttacactggtgaatacacccctgtatgggataacttattagatgatatgcgtaagacacaaggcgcagaacctgaaattaagactacaaaagtaaatcagttagctacctatgaagatgccttaaagtttattgaaacaaatggtacgttttatgtaattggtgaggaagtaattgttaaggttaaagatgcaaaagagctagcattgatgttaatgtactttagagatgctattgaagaactaagaggagaatacgaccctaaaaaacatcatgtagatatgacaattgaattatcaaaagatgttttgaaaaaaatggcagtacctagacatgaattagacttatctttaggtggcttaatgagagctgtatcacataatgttggagaagacctttttgaaactcttgggtttgactacatgaagcaagcttgggaagtcttagttaattgcttgtcactagacactatccatgaggtacctttccgtgtgctagacgaattagagaaagtaacagatagcatgtctactacagaccatattgttaccttgtatgcaggtagagaacttaaaaaattctattcagaggaagagtactttgatgtaatcacacacaatttagctgatgtgattatggattggtcaactatttttactacagctgttcttaataatacagaagatgatgaacaccttaaagagctacagcttaactttgagagattcaagttagatgtagcagaggttctattaggtaatgttgcaagacatttgctatatgcaggagttaccgatagctttaacgaagttaaccattatgttgtcggagcaggtaacctgattagaacagaaggtttggttagaatagaagaattaactgggacattagacgactctaaagacggagatagctctgaaacagataataaagagtcattagatgacatctttacaaatacaggtgatgatggtgttgaagactttacaaaagaagtagacgagcttgccatgtttgagaacgaacatgctgaggaacttttggaagtcaataacaaattaaaagataatcaagagttattacgtaaaactgtggaggcgatgggtatggcttcttactctactattgattcatcatttgaacaagaggaagaaacagatagcaaccacacagagacttgtgaggataccagagctttccaaatgttaagctatgcagtacgttcaggagacaaattacttgaacgtgtagagaatcacccacaaactgaaaaagggttgagaatggctaaagattctctaaaagagtttgaccatacagttaaaccagaattagaagcttatttaaaagcagaagagttagcggaagacgttgatagacatgcaattgtaactacaattatccgtatcaaggacactatggaagcagatatggacggctgtaccgacccagtagagcaaggtttattctacgcaggaagcctaaatatgttagaagaaatggaatcattgttacgggctagcaatagaggttatggttgggacgtaacagctatctatcttatcttgtccattgaactagcttatgggacttacgggttgtctgatttagactttacaattaaaaataaagaggaaactcgtaaagaagaacaagatgcaattaatggcattgtaaacttcttagccaatcttttaaatacagtactagaagaagaatcagaatcagaagaaacaactgtagtagtcgaagaggaagaagagggtaaggatgacttctcactatctacagaagacactgctaagctattggcagactggtcaaatggtctacctacgtatgtcgttactcgtaaatacggaattagtatgggagctttatactctatcttatatgcaaatggggcagacgttaaatcttctaaagtagcagaacgagtggctcatgtggaaaatgacaaagatatgttaaacgcagtcattcgagactacaagaacggtactcgtttagtagatatttatactaaatacaaattatataaaaatggtttgttctatcttttagataaatatcgagttccacgtagaggacgtacaaagaaataacaatgattaaggtagtggtgttcaactactacctaatcttttattagggaggaacttaattgattctttttatatttagcattattacaatgctatccatgttcttactatatttgtttgggatggcttccgtagctctacttcaactaggactccttataggtagtcaaaatgatatagctaaaggcatgcactctttacttttcacaggtattgcacttactgtagtcaccggaataactagacagtgtttactattattttaaaaaaaattggaggatttagcatgttgttttttattgttttagcagtatttataggcgggcttgctttatggggaatgtatgatagttatgggtacctagactggacttcatggttatttagtattgtggtaggctctgctgtagctacttttttcacactggcagtggtcggaattactttcgatgttgcaccaagtcatggggtaacgaaaagtcatgaattacaccctatctatgagaacagtaaagtagttgtagaggctaaaaaagaccagtttgagattaacgtagatggcggtttggtagctattgatgcagaaggtactactatcctatctactaaaggagaggttaagcctaaaattgtgtttacagagaactatataaacaacaactggtggactcgtttcctaggtatagcaggtaaggtaaaagacacttcatcagttctttatttagactcagataccttagtgtacaataagccggaaaagaacagtagcgcaccagatttaaaaattaaataaataatttagaaaaggggcttgcataaagcctctttttatgttagtatgtatttatagataggagggctactatggaagatgaagtagtatacttagatgagtttatgaattttttaactgatagtggagtaaatactgatgatattaacgtagtagatgatagacaggagggatagtatgtcttatacaaaagaagcattagaagctagaggctatcagtttgacaatatgtctatgatagataagatggatgccttgttagaactgctagaggaaccagaatttcgagaaaagatgaaagaagagtacgcagagttctctaagaggcacaataacgatgaagaatgaaaagttagagtcttactttatgaaagagattgcacctattttagatgaaatagagatgagtgaagaattgataaagggaatggagaacaacaacccatccgatatgattacagtctctttttccaaagaagaagtagacatactcttagcaatgttagaccttgaggtacctagattagacagtggttctgaattgtttagccctaatctggtaagggaagctaaactacaattaattaagaacaagctaacttcaaaatgatttctcactagaattaattagtgagaaaaaaattaaataaaactattgacaaataacaaaacatgatgtaaactaagtttataagataaagaagaggagagatacacatgaatgaacaaaagaaagtatatgcaaaattaacagaggacgaggcagtatttgcttgtgaactaggagataaaattaaacaaattagagagagccaagagctatctcgattagaacttgcaaaacgagcaaaagtagaccactcaacattaatcttaattgaacaaggtaaacgactaccaacattacgtattatgatgaagttgagcaaagcactacaccgagaattagctattagctttacagattaaggaggggcatcatgagagggagcctagattattacaactatttgtaccaaacaattgaaaatcgacctacggaggagctagatgtcctttatgacggtctttataaaaaagccggtgacctgtttgcaatagataacttccaaggagttaaagaaggcagactaattttaaaaatattaaaggctattagagaagaaattaatagtagaattgatgaagaaattgacctttacttgtataatatctatgacagtatatcagatgaagacaaacgagtaaattggttatatgaggtgtaggtatgtttagtgttgttaaggctgacagctatgttaaatcagacatagaaatgtatgaatttaagaatgtaaaaagtttggcattgactaagaaagagaaagaactgtggacaggcaaaattgctaaatatgttaatgagtttattgtaaatgcttatggagactaccatgggaataaaatacctgaaataaatgttgtaatcaatggtaagctaagaagaaccctaggttcttttgtccaattcactaacacaaacaaacactgtatagagataaatggtaggtttgttaaagaagttattctattacaagaaacacccttagctcaaagagcgcttgatattttaatggatgtagccagacatgaagctatccactatacactttgttatttaaatagtttaagtgggggagacctaccaacgttcaactaccatgacggtggggaagactttgaaaaagatttatgtttgacaggaacttcacctagtggcgctacgaaagaagagtatatttatagttcttttacactaggagccatcagatgccgacaccatagtacttgccctgaatgtgggttggaaacatacatgtatacacgaggacggtactactgccataatgggtgtgtaggggataacggtagaaaaattatatttagaccacaaggtgatattgcaatttatattgatgaaccaaaatctaaagctaaaccaaaagtagaggaagctctgaaagactataaaggagcgttaaagctaccttatacaggtacggaagaaataaaataaaaaaaatagttaaatgtattgacaaataacaaaacatgatgtaaactaagtttataagataaagaagaggagagatttattatggcatacgtaacaaatattgatgtagtagcagatgggttagatttgtataatgggaactatgtggtagaacgaggtcaagtagttacttttaaactacatgtagcgacatggaacaatgagcctacacccgaaaatgcttatgcgattattcgtaataatggggtagattataagagtaaagttgatgaatttggtaatgcagaggttaccttcccagttaatggtcgtcctgaccaagtaacaactagcatctttgcattaacttctggatatgagggggatatgcctcgtgtaatgtcagctatctttagtgacgaaacagaaattaaacaaactgtaatgaacgttacagcgtctattaatggggagccagttagtcgtgaaggtgtatttttagaacgagaccaagtagtcactgtggatgttaaagcaacattatctacaggtaagttctgggaaggtgcacaggtaggtgtgtacaataacaacacggaatacttaggtgacctagatgcagatggttatggttcagtaactttccaagtaaaaggaaaacaagggatggacacatcagctatctacgtattcgttaaagaccatgaacgagaagctacactaacagttcctgtgaagtttactaatactactgttactacagaaacttctacagaagaatcgtctactgttgatacgactacaggaacagaggagtcttctactacggatacaaccactgtagaaagctctacaacggattctacgtcctctacagtagattctacagaaagtacagtagaaagctctacagagcaaacagtgaccaatgaggacacttctactgattcaggagtagttgaaactacagaaacttctcaagtagcaggctacacagagtctacttctagttctacagagtctaaagaagttaaggaaactcatactagcactacagaacctgctaaagagttgccatctacaggcacagaggtgaactatgggcttgttgggttcggtggtgtaacattaacagttgtagtggcactagtagttaaaaaattgttgaataagtaagaaacataatattgcgaccctcattaattgggggttgcaaattatattattttttttaaataaacctattgacatttaacaaactataaggtaaactaagttcataagataaaggagggaaacaaatgagtcaagtaagcaaacatggagaaaaacgtgtacgtgaacgtgtaggagtgaataagagctctgtagaccgacaatttgagttagctttagaacgaggatacagacaaaaagagctaacaggtcgtctaaagaaatgggtagtatcaagagtatttaactctaagtaccctcaaacatgtattttatataatggtaaatgcttcattgttagcagtgaaggtacactagttactgtgttaaatattccaagtaatttactaaaagattttgcaaaattatctaagaaaagaggaaaataaaatggatattatggacattgagtttttagaagaacataaacaattagtaaaagaacatgtagagcaagaattaaaattaatgcaccctcttaagaagttacaagtaatgacagaatggttaggagatacagaagacaagctttctcaaggagacttagattacttcaatgacttaacagaaacagagctaatagaggcaatggatgctagtgaaattgtagagtcttattcagatgtcttgttagattttattgactactacaatattgatttaactggtttagaggaacagctaggtgtgtaaccatggataaggctgaaaaggtagataacattgtaagacaggtcacaggggctgttattaagacaactgcaaaagtagcttttattgtttttgttttaacatttgcaggtgttttagtaggttattatagttattcatttttaacaagtgcagggtggtttgccttacctatgatattatcagtagatttgctatatgttgcggtactgttaggcgggctagcctttatatttgcagaggtctacaaagtagttttagaagtgaaaaagatagttaaacgaggagggcaattatgagtaataaaacattagaacaaagagtaatagatgctaacaaagagataaacgataagcttaacgaatcatcaattattcgtaaacaaattgaagaattagaggaacaggaagccatcttactatcagacgtagaggacttacttgattacttagaaaatattggaatagacctataggagggacttattatgaataaaaaagtagaggaaatgacaatggaagaaaaagacaaagcactaattgcaatgggacttattgatgtaacgcaggaggtagactgggtagtattagctacttgtgaagaatgtagagaagagtacgaaggagaggagtacgaagaaggggactgtgcagagtgtgaacattgtggaggagaatactttatgattgagacagctctcgagggtactcgttgtggacgttgtgatgactactttgatatgtgggacgactactttgagtttgagaatgaaggtaacccatataaagataaacatatctgtgaacattgttatgaagaactagtatctatgggaatggaagagaaattttaagatactactaagaaggagacttaatcatgaacgaattagaagaacttaaaaatacactgattagacaaaaactttcaatgttggagagttacgaaatgagagaagcatcattttggataatgtttaatgggatattacgtgttatcatgtcagtagctgtcatagcctttgtaaactatgctaagaatgtaagaccagataatgtagccacatggtttctagctctgatttgggttattttcctagcagaaggtattaaaggtgcttatgatgctattgcatttggtattcaccgcaaaaaatttgctaaacatattaaaaatatgcgtggagtaatcacaatcacacaattacttattgaagaagacgaagagaaattaaacggaggcaagctagatgagtaaagatgagaaattagttgagtggtttgtagttgccttaatggtgattgtgtggttgcttatcacgttcagtatcttatacacaatagtttccttacctttcatggtacacgaaggggactggctagggattgtgcgaaacgtactactggacattgtagtattggtaattggggttgtcgctacatggttgcaattaatatttaaaaaaggaatggaggaataattaatgggatatttagagagtgcaattgaagaaattgaacgagtactactaggaaataaaagtcgtgacaccgaagaagtttatttaaacaatgcaattcggtatatcaaaaaagagttaaagaaaaaagaggtagagccaacgtggttaaatgaaccacagacattgttccttaattggtttaacgaattatacgcagtaggtggtttaactcatgtaacagaggcagtaggttttttagaatccacaggaggtagaatgaagtatccagaagcatattctgctttcagtaatttaagtgagaatgaattgcttgaggtttacagtaaattttatacagggttattcttaaaagcacaagggggtgaattagaatgaactttcatggtaaagtatttcatgataaagtatttgacattctttctcgtgattaccctgattggcagaggtatcagacagagaaacgaccacatcccaatgagcttagaaaagactttgccattgatagtacagatagtagatatgaagagtatgttatgggagagtttaatgtagaaacggctagcggagatgttaaagtatacgcagtaggaattagaagagtagttcataaaagagctgaggaggagtaaatcaagtggagtacacagagaaagacattaaagaaggtatgaagttacgttgcacagataatagtaatgtaggttactgggaagttgataaggtttacgaggtaacacgtaataaagaccttggcttagttatcgcaggggaaggtgaaaggagtcacagaaccgtaaagtatattttaggggtgttaaatggtgacagcaaaattaaatttgaagttgtagaggaaaagcctgtacgatttgctaaggtaacttgtgtataccctcctgatagaggtcttgtagaggttgggcattgttatgaagtgcttaaagagttccctacaggaagtgtgcgtatctaccttaatagtaaactagggaaccattcgttactcccagaccagtttgtctttgtagatgagccatcaaatgatggagaaaaagacgtagaagagctagatgtagaagctaagattctagctgatattgaacagctaaaaacggaggcagagtgcctatttgctaagcgtgaccgtgtaaatgaacaagcacttaacttaaatgcaaaagctcgtaagttagaggagtctttagaggtactaagggagtacatgtagctaagtgtttttatgattacatctattaaggagatgagagaatgatttattatattaattttttagaagattttgcatcaagttggagtgcagataagcgttaccgtgttcgtagaattatgacaactggtagctacgctattattgacaactatggtcatgtcagattcagcagtgacacagtacgaggtgttcttaagaatatagagcaggagtatgccactaataaggttgagcttacactagtagaagaagaggcaatgaataagcctaggtttaaagtaggggaacgagtgaaagtgtctaatgatttacaggcattcgggatagaatataagactcacataacctctaagatgctaggctatgcaggtaatgaggctactattacacgtgtttggggaagtaacgtacgctactttattaacatcgatggtacacatcaagattggtgttggacggaggacatgttagataagattgaagaagaacctacactatctgttagatgtgttgaggcagttcaccccttttggacaaaaggtaaagactacgagataaaccttacatctgatggtcgctatcgggtctgggatgatgaggaagatggtagcagtggcaaatccataaaagaactactggacgttatcaatagtggcggtaacaaatttgagctactagatgaaacaccctcagaagcagaacctaggctaaaccatgacatgtctgacttagagaagatagaggctaagattactgccttatcggaagaatcttatcagttgttcgagaagagtgaagagttaagtactagagcaattgaactgcaagatgagtcaatagctttagaagaagcattgtatactattaaacaatatttataggaggagatttaaatgcgtaaaaatgtaatttgtagattagaatgtgtttcaaaagacaaagacaacttaggtgaatggactgtagataatatttaccctgtgtttgaatcagaactaggtaaagtatatatcctcgatgatgaaggtaccacttgttccagagatagcgtgtctcttattatctctagtatggctagctttggggtaacatttagggtagcaaaagataaagcagaagactctatccctagcaatccacaaagcagtacatcattagaaatagttaaagggtatgaacacttagcggagtttatagactcattaagtagcaaccaacgtgtagtgtctcactcagtagaccctaactctcaatggcactatatcatttatgaaactaagtcagctgaattgggcggagtaaccttagaggaactactagacacactagtgtataatgtacatgttgtagtgatggaacgtagtaagagaacatacgagccactagaaagtcacacgtttaagtgggaatatgggacaaagaataccgaggattgggaaaaaattgtacctttattaggttgcaaggtgtttaatgttaacctcaatagtaacagagggttccatattactattttgaaataaactgttgacaactactatagtccatgctatagtaggtacatagataaaaaacaaacaatattaggaggtagcatagagtgaaagaaacagaaaagaagtatagcagagagtataaggggctagaatttgaaattattatcacttattaccctgaacaagacatgtattttgtaattgtaaggaacggacagcaccgtacactaactaaggttacagggaaagagtggggaatgagccctcatacagaggaagctgttattgaggtagcacttgatacatgctacacctatattgaaaatcaagaagcgcaaaataactagattaaggagggactatgatggtaggggatttcattttatggtttaaacaagcatggaaagaaacattctgtattcatgactacacggttaaaggtgtgtacaaaacactagataaccatggatacttaaaatgtaaaaagtgtggaagaattaaataggaggacaacaacatgaaccagagacagattaaaaaacgaatgaagaaagttttagctattttaaatgaggtagaagttgtagattcagattacgattcaggtatggtattgtatgtagacgttgcggataacgagcagaatagagatattattaaagaggtatgcggaatcttaggtcttgataaagagaagtttattgcagagtgcaaagaatcaagactctatgaggaaacattgaatttagcaagttgttggcactatcttatgcaaaaagaacctaaaaaacttactatttggcatagtgttagtaaagggttctctttagaaagatacagtgaagattgagtattgttatatgagaagtgttgggctgtcgttatcagattttatttaaggagatgaaatactaatgtttaaaaaagataaaaaagaagaaaagacttatagagaaggagaccttcttaaggctgtaggaggttattatccggatgctaggttgagtttaggaatcacatatccattgtataaaaccaccaatgagggttggtatattatcaataacgaaggtagtcgggtaaccttaatcgaaatggatgctttaggcattgactacgctgtgatggaagaacccttattagaattaaaagaaggagacccattactagtcgtgtccgaccttaagagaggtgttcgaggcttagcaggtgcagaagtacagtgtttaaacattaccggtgaaatggcttcactagcaggtacagttgttcattatgataaagatatgagccatattgcaaaggggctgttcactgttaaagagaacgattcttattggtgtgtagcgattgctattccactaaataaagtagctgaccctgattttgcattagagcatttgcttgctacgttaaataaaaaagcctctactaaacgtctgatattgaatgagataaaatatgatttaaaccttcttcacaaagagctagacgaggtgtccaacgaagtagagaagctaacaaaaaacattgaaacaatctataataaccggtaggaggtacttagatgagtatgccgagtgatttagggaaaacattaaagaaacctattgcaataaataagaaccctgatttttatgagttagcggtaggtggtaaagttatctacaacgaagaagtaatggagattgctaaagctttctctaataagaagactaagtattacctgttaaacacacggagtaacaaacaagtatgtgtgccagtgtaccatgtaagaccttatgatacccaagtagaaggtcttaaactaggtgatgtcctagatgctatgcacattatgacaactgtaacgttaagggcagtgaacaagcacgggtttgctgtcgatgaggatattattgaatgtttagtagatgacatcccagaaaatgcgcttattgttaccagtgaggtatcccgtattcagccagaggattttggtaaggtaactattgactattttgtttagatatgttaggatagacttaagataggataggataaacttaggatgcactttggtttaggataggtttaggataagataggatacaggataggataaacttaggatagacttaggatgcactttggtttaggataggatgggggatatgactatgagttacgttaacgagtttgaaacaattggagattggttagatagagaaatttatgatgtgctactaagagatgagcatgatattgaagaattagataattggggaatggctttgtttgccttaagtgaaggttacgttctaacagatggacttgataaaccattcctagagttaactagagaagacctagtagcaggctacaaccactttaaagaagaactgaatgggtggttacgaggaggtaaactgctagaagtctctgataatttatctacaattcaagggttcagttttgaccatgacgatgttttattcttagaggataacaacaaagcttatgtaatgctagtaggtattatcattgaagcaagagacacatataaaaatggtttctgtaagggttactatgtaataccttaccaagattgagttagccttatggctagctttttcttttaccttaagtagcaggctacaaaatctcctaagtagctggctacaaaacgaaaaatcctctaagtagcaggttgcaaaatgagaaatcccctaagtagcaggctacaaaatcaggatgcgccctgctagcggtggagagtcaagccatgcgggttcaccttaatagctaccttccctagattgtcggtttttcttcctttatatagtaagaaaaaataatttaaaaaaaaataaacttttctattgacaaaaaacaaaagctagtataatatagagcgtgtaaggaacaacaataataaaaaaaaataaagataaaggggcgctattaaaatgaacaagtataaatttacctatgcagacattaagaatttaccagaggaagaaaaagaaaaagaattaaaaaatcggtgtggtgttttagcggtagagtgcttaagcactaaacagctacaaaagaaaaaacctcggtttatggttttcttagatactattatttttgatagtaccgcagaaacaggcggacaatacgcaacggcaaccgttaaaaccgaaccgataggagacggacgttttcgagtgtgtgacggttgggggcaactttctaatggaattattgaactgttaaaataatttataaaaaaactattgacaaataacaaaagataaactataataaacttgtcagataaagaaaggaagttataaacatgtttaaaagattagaagagtaccgcaaaaatttatctaatgaagaacttaaaattttcaacaatacaatgaagctattaaatgataataagacagactttcaagaaagaacaaaaaattttgataaagaactacaatatacagagctagaaaatgaaaaagaaaaaattttgatagtattagacactattcgagtgagtaacgaaaattacaagaatgttatatctgaaaacttatatcactctattaaagaaatgacaattatttttgagttactttataacttatagaaaaaaaattaatcaaaactattgacaaaaaacaaaagatagtgtattataaatttataagataaagaaaggaagttatgaacatgaatgaattagaagcagtgaaagaatggaataataaaattgaggaacaacaagaagtgctaaacaaggttattgttactttttataaagaaatcgatttaaaggttaaaatggtaaaccgtggtttgctaggacagttatcagcttttaacgaactaaaaggaatgctatcaggtatcgagctaacagcaaaggttattgcacctgataacgtgctacctattacaacccacaactttttagaatatttatttctaggggataacgaacaacgagcatacgcaaaagaatacctagacggctttttaaaatcagtagaataaggggaggaaaattttcctcctttacataaaaaaaagattgacaagttaaaagaaccatgataacatataaatgtagacaagggaggggctttacatgatgaacggactaaaaagacttatgaaagctaaacgatacaagaaagaagtaaaagaaattatcactatgcaaaagaaagcaataaacgaactagaaacattaaataaaaatttaaaattaatcaatcaaaactattgacaaataacaacaattgatgtatacttaattcataagataaagagagagaggtttaaacatgacaaaagaagagctaaaaagttacctagagaattataacaagcctttttcaactagtatggataatgttttctcactgtttataaacgatgtgagagccgttgcagatgattttagaaaaggcgaagcgtttatatatacatgtgccgaacttatagaggaacaagccgaaacactagaaaaaagtgacttagaggaattagaagaaaaatcaggggaaagccttgttatacaggacataaacggctatttatattttatttaaaaaaaattaatcaaaactattgacaaaaaacaaggactagtatataataaacttatcagataaagagaggaagttataaacatgattatcgcagaaaatgagttatacttaattaaaaatccattaaatgagtgggatatgaactaccatttaattgaaaaagaaacaggaaaagactttttgattgatatagatgacgtggcagacaatgaagaagaaagagaaaaatatgaactaggtttactattttcagacttgaaaaatcttatagttgatttgcttattgagtatagttggaaaactatttaaaaaaaaattaatcaaaactattgacaaaaaacaacaattgatatatacttaattcataagataaagagaggaagttatgaacatgacagaacaacaatttaaaaaagagcatttattagaaccaacagaatggcgtagtgggggctacttagacactagtttaatcgaccaatcacaatcttattatattgaatcacgtcctagaatttacggcgggtgttacgtttatcaatatgttacaatgaaagatggcacggtctacgagctttacagcatgacggcaagcactaggggaattgttgcacataactgccacgctagaaacgtattgcaaagagatgtaaaacaatacagagacagcgccattcattattaagggagggggttcccctcctctacatagaaaaaaattgttttatctattgacaaaaaacaaaagatagtgtaatataaatttataagataaagaaaggaagttttaaatatgaaattatctgatattattctaatggggttgcttgttagcgttgtgctactttggggctaccttagcattatgatttgcttacaagttttcagagcgttaggcggttgggatattagaacgttaacggtttgcagtggtttgctatttgcctatgttttcggtttaaaaggaatctgggaacaaggaacagggaaaaacaaataaaaaaaaattaaaaaaaactattgacaaaaaacaaactatagtgtattataaatttataagataaagaaaggaagttatgaacatgaatgaattagaatgtatttacgacagcagaaagagcttttatggaaaagctaacctagtagaagaggaaaacggtatttctctttattcatatgatacaaaagttgcgacaatttatactaatggactagcaaaggttttcggtacgtactcacaaacaacgttacgacatattaaggaatttcttaagcaaaacgggctaaaagcagacactaaaaaacaaattgaaaaagattatctataatagaggggggcttcctccctttacatagactaggagggcttgagatgacagcagaggaaaaagcactaaacattgcagagaatagaggtattacagattataaggttagggggaacgtattaagctattatactagttatccaatggaacggtgtacgtacctcgtaactattgacattgaaacgctagaagaagaaagaaaagaactcaaaaaatattataaaaaaggcttgcaaaatgcttgcttataatctataatataaagaggggtggcggttactattaataatagaataaaaaaattgcaatatgaaagaatcagaaagctagaaaagagaaaaagaggtgaaccacctgaatttattttcaacggtaactattcattggaagaaatagagttattcttacattttagaaaaaaaagtgagggcaaaaaaatgttaaaaacagaagaaattaataattcagagcatacaggataccttatactagatggagataatctagttgtgcgagtagagaaaaatagagaaacaggggaaaccttttgttatgtttatgcagatagcaatgatgatgattttacagcaaaatttaaaattgaatagtcaaaactattgacaaataacaaaagatagactataataggtttataagataaagaaaggaatggcaaagatgacaaaaacagaactacaatataaaaaagcaataggagttgcaatctttgcaacaagtggaaaggataaaaagcaactaggaaacgtggcaccgtttagcatttatgagattttagaaattgacttaaataaaaatcgggtatattatgctttaaattgtggggaacgacatgcagtatgctttactaaactacgcaaagaagaagaaacagggaacgattttattttaatcaataaacaaccatttttcttaaaagatatgcacaaaggtttaagttggtcaaaaagtttataaaaaaactattgacaaataacaataactaatatacaataggtttataaaataaagagaggaagtttttaacatgacaaaagaaaacaacgtatttttaaatgaaaaagagctaatgaaagaagttattgacactttagaaaatggctttgatggttattattgcgacttacatggtgagatttttaatcatggagcaaatgctgacattaaagacttggaagaatatggaatttttaacgcaattggagaaatacaagaatacgaagaagaaaattttggggaggttttgacagacctaggaaacccgacggaggttaccaatacgctttactatattaaaggtcacgagtttttatatggtagattagattttaatgacgttttagcagatgttgcagaggggctaaaattagataaagacttatggaacgaggaagccaccgaggaagtgaacaaggctattattgagtgtttaaaaaaagaagtgccttatttaatagattagaaaaacagggaggagtttcctccctttacatagaaaaaaaatataaaataagggaagtgctaaacatggaaacattagaaaaattcggttatacatggcaaggaatgaaagaagttacaaaagaagaagcagagaaaaacattaagaacggggtcggcacttttctattatatccagataacaacaattgaagcagtgaaagaaagaaagcaatgcaatattagataaagtattgagagcttgcaacttgttaccaactgaaaagaacgtgcaaacagctaaaaactttttagaagaacaaggctttaaagtagaagctagtaaagagttagcgggaaaataccttgtaaaattttcaatttaataataaagaatgaagaggggaagttataaaaatgaaactaacagaaaaggaactaaacacaattttaagagatgatgaaacagggaaagggggaacggctttcttaggtgaaacactagccgacttcttagaagaatcaggtattgactttacaaacctaactattttagaagtaaatgaattactagaaaataatggaattgaaccaattgaggtagtgccatgttaaaaaatatcaaaaaatcagataaactcactagaaaagatatacaaggtttttggggagatgaaacaaaaacattagaagaatggtataagtcaatttcaaaagaatcagacaccgaaaaagtagaaactgctaaaatgattaatacattgaaagaatatgcaaataacaacgaattccatttcgtaaaaggagagcaaggacaatgacaaacacaaacaaccaacaatggaatcagaagtttaatgatggtactatgaaccagaacaaccaacaaaaggaagttatcactttacaagtcgcagaaagtttcgttagtcagattttaacaaaagaatattcggtgattggtttagttattctaatgttttattttatgtttggcatgtttggcattttcgggggtgcaatctatattgctttcactcacacaaatcgtaaaatcggggcatggcaacaagtaagaagcgtatacactattaaggaggaacaagaagaatggaacaattaaaagggctaacaattagagaattgattaagaaactagaagaagtgccagaagaaaataaggacttgcctatttatacttttgaaaatgaaaactctttgcctattaaagatatttcattatatgatgaaaatgctaaacactcacaagaaaacccgttaagttttgatgtaatcagataaggaggggcaaagatgaatagtttcatgaataaacaagctaaacaggtaaaaagaagtaaagaaataaaactagtggaagaagtaagaagagaaaacgtaaagaaacgcttttcggaggaagtgaaaaagtacttagaaaaagggtatacaatcaggttagaaaataaagtttttccatttgctttaatatctattgacctagaaaaaggggaaaaggtcatcagtcttattcttgtgaacgaatatgatggaatagcaaactatactgtaatgaaaaaggttaccttaagagaaaaagggaatagagctatcctaaaaagaacgctaacggataaagatgtaaaaataataagtttatggaaaggaatataaaagaatgagtgtatacagtttaaaattactagcaatcttagggatagtattattcttttcagttatcgggatagtgtacgataataaacaggacgaaaagaaataaacatataaagaggtaaagagataaggaactatagagctatagaactatatacacttataggggaagagatggaggaggggaggaggtaaaggaaagaagagggagaaagaaagcaataaggaataaggcaataaagaaaaaaagttgtttacctatatacttatacacctatgtacctatatacagatagcccctaacaagcaatagtaagggaataaaggaataagagagagagaggaaagaggaaagaggaaaaaaagttgtttacctgagattttaaagaatcgacttcaccagaaacccgacaagggggcgcataagtctatttcaaaataatctgaaataagtatagttattactgtttatatatgattatccttaaatatctgaaaataggggcgtttatcttattatatagttagctatcttacactattaatcatctagcctattactgcattcattgctattatattctatatagggagcgcttatactgtttatagtgtaattatgaggggaacgactaggaacgcttatacgggcttatagggggctttaaatgcataggctatttatacatatattagaatacacaaggaggaggggcagaaagttagtagattagactgttaaaaacaaacgggggatagatgcacattgttattttactgattgggctaggttaactagctaaaataagaatgttattgtagcaacgtttataagaaataggggtgtacttttcccctagggaggttttaaaagggtataaaattcttttgttatttaattaaaaatttcatcttttctattgacaaataacaaactatattgtatactaggtttatcagatagagagaggaagttatagacatggaatatacattagacgaattactagaagaggaatacagcacactagacgaattgctagacagtgaagaatttaaaaaacaaatggacaattttagtcacatcccgcaaatgcaaccgcaaagccataacagcaatacgctagcagacacggggcgctatcctgaaaaataaaattgaaaaaaggggttgacaatttcagcccctagtgatatactaggtttataagatagagagggaggaatttcacaatgaaagcaatcatcatcaaacaaattaaggacggttaccaaggtatcttagaacgtaaggagaacggttggacaaaagaggaactaagcgactatacagcgggggtaagcaacacactagttgaccttttcaatgagttacaaggcagtagctttattacagacaaggaagcggaagaaatcgaggaagtattttctactactatcgatacattagaattttagtcttatctattgacaaaaaacaaaacatagtgtaatatataattatagagagggaggggaacctccctgatacataaataaaccaaaacgggggctactaacatgacaaactttgaaaaagaattattctctaaaatcttaaaaggtaacatcatctacgaaattgcggggaaagaaaacgaaatgttagacggttacattacagaagaagagtttgaagaatttaaaacaatgcagaacttactagacgtagcgggaaacatctttacagaagcttatacaagtggttactttaaatcaagtaaaacagacacggttatagaagctaaacacgttaagtttttaggttatgaagaaatcgaatgtattaaagcgatggcagtgttacaagctaaaatgaaatttaaataaaactattgacaaataacaagaactagtatataataatcagtgtaaggggagggaaacctccctatatacaaaaagaataggggtgaatgagaaagtgaaaacaacgaaactttatatctttcacagaaaaagcgagctaaattggtttttagataacctagaagcaaacaatcagaaagttgtagggtttgcaatagacccactaacaggggctagagaattaattattgaaacaattaaagaataaaaaaattaaataaaactattgacaaataacaataactaatatataataaacttatcagataaagagaggaagttattactatgacaatcgaacaagtgaaagattacggcaaagcatacggaaaagagctatcaactaaggaagtaaaagaattttttgagaaacacaacgacatgccttcactaatggacttagcaaagttttgcggggcaatgaacgaggacggaacaaaaaattaaaaaaaagttattgacaattaacgacaactagtgtaatataataggtgtaagagagagagggaggaacaaacatgttagtaagcaaagacggatttattaaacaaatggaaaacaaaagtaaagaagaggtattagaattacttaatgattggtttggtgttagtgactatgatacagttatgggagaattgggagagatgaaaaaagttacctttacaggtagcacaaaccaacctttattaggtggtaacaatgacttaatcggtttacctcaattctttaaaggtaacgaagcagaatcagagttcccaacttatgaagaattactagaggaactagagaaagatacatggaatcttaaagcagaagataatacgtataactacagtggctttttagaacgtgatatggactttaaagttatccaagcagaaaatacagacacgactattgcattctttgcaatccatatgggggtagatgtgagagcgggctactcaaaagcaatcccagttatttttgaaacttattacgattttcaagagttcctaggtaactacttttatagtcaaggttactatgcttttaaacacgacaacaaggaatacacaatcagtttagatgtttcggctacctcggaatatgtacgaatttatataactgataataataacaacgagttacaactagactacgaacaagaaacttgtatggacttagacaaagagagcgtagcagaatacctgactagccaaggaattgagtttaaagacttgaaacctgcattgtaaccatataaggcactagggagcttatacaatagagctacaagcttcctagtgtaattataaggtaaataactagaaacgcttatacgaaagaataaggggctttaaaatgaagtttaggcggatattatgaactgctaaaattattgagctaatctattgacaaatagcaataactttggtattctatatttgtaagataaataaaacaaatgaaagagagtgttaagaatggaaaataacaaagcgtatgaaagactattgaaagaagtagaaaacttacagaatgatttaatggatatcgaggactattcagaagaagtatatcaagcctttcaaagattaatcgaagaactcgaagaggtaaccgaataggactagaccagtcctataggtatataccagttgacctccccccgtggttttttgaccgtactttgggggtggggctatttgcctaccccgaccctcgggtacctattttttctaggaaaattattttttatatatttagaaagtcaacaccctacatataaagtcaacataagggctcaccctagggctcctatatgagctcacctaaatactcccatataaaaaagacccctccccgttgataaggatagggtcttttttatttatccgtctgccctatgattggttattaggttcaggttccgccaagcacgacctcggttacattagtgtaatgggcatacccttgtaagtccccactctccacaatgtagtagtcagtgaactctttacacgcactattatcgtaacctattactctccccatagggctcctacctctgccattacactcgaaggtgaaattattaagtctaacttgtgtgttgatagggagcaaaggctctcctcttgaatttagcatgttaatgtggctccttttatttagtattcttaggttaatagcacaaccaagccactaatgacgactaagactacgtaaatttccactaaaaatgagtatatagtaaaaacaatagacaatacagtagtgaatatcgcagaggctatcacccatttagtatttaaactattcgacaaaacaacaataccaacgataaattcaactagagcatagcccaagacataaatacctacaatacttagagtaatgagtacagggtgacttataaatccaccccatacattataaaaaatatttagcatatggttactcccctctaagactaatttgttccgccatagtctttgcgaagtatgtccagtatttatggaagtctgcgaagtccaagaaatactctccaacaatctctccttcttgattgcggtaaagaggtactttcgttttctcgtctttacggacttcatactctgtgccatttaacgaaatccatacaatatccggagtcacactagttactgttgccttatcgcaacctagtattgggtcacgaagttctggttttgtgaagattgtatccccaaccttcaatttgtttaaccgctctttgtctattaatgctgtttccatttattttttttctccttatacgttataaaaaaatatttaacatctagttactgccctcaaataaagaacattactacccatccaataagcataaataacaatgttgatacagtagcttttgcaaataccatcaaaatagaatcttctgtatttgtagtagtcttagctgtaataaaactaataaatacatctagcccaattgcctgcgcccatgtaagtgttaacaccccaaatgttggagcaattaacccgttccacaagaacatcgtaacataccctccaataacaagggtcaacaccactagaactaaagtcccaaaaaatttacctaatgcgtttaccaattcttcttttgtattcttatccattgttttcctccttaataatagctatatttacctcttattttttttgttaattctatttaggcttgcaaaagtaattatgttcaagatatatgcactaattactaatactgcctgcattgtgcaaaacacgattgttatccagtagcttgtagtagattccccgctagttagcccccaataaatgctatatgtcaccatgagtgtgtttagcagtatagctacaccccctaccaataatagtaggtaatcagatagtttcacttagttcccctccattgaatgattaagtaagctcttgttcagctcttttaagtagtagtcgcacctaacgttcacaagacccatacgttcccctgtaatagggttataatgtaatcgtgtaggtactgtgtactcattaggtatagataagtctaattgggtagttaaattgactactctatccggagggtacatccatagaggcttattacagtgccaacatgacccactttgtagtacctcgtattctcgtttaagttatttctcttcttctcttgttaattggtcgtgatagcactgtgccattacgtatgtctccctccgtttttatatttgttatagtttagtgttaaaccagtcctataccctctcctagcgtttacaatagttgtttagggtgataataggtagaatacctataaccgccctaagaggcatatagagtaattataggactggtgcttagttaactgttttaagtagcatggaaaatatgcgcttaagtcaacattagttcttttactttagatgatgtcaattgcgatataatgattcgttttggatacattagcaatttcatagtctaagtatggttctagtacttcgttgttacttcctatctttgttctaactgttatggtagcccctgccgtggggtaagtaacgagtacgtccactccgggcttcattaacttaattaaatcttttaacttcatctttgtctcctctttaatagtatatgcttaaatctactttatgtcaactactcaatttttgtgctcgtagttgcacggatattgtatcaacaatgactgcccactgctcctccgtaaagttgaagtcaaactgtgtatagtcttcctcacctgttgtagtaattgcaatgtccccatagtcatcaactgagaaataaatagttgcagtcgcattttcctccggattttgagggagtgtaatagctaattccccttgctctactttcatctatggtgcctccttagctctcttccttctcaatcatcttgatacctgtaaaggcatatacagggagttcttctgtgtaagtgtactgattagctttaaaggtcacttcgtagtaactctccatgccacagtgtaacatgtctacatatctaatttccttacaaggcatagcgtttctctcactcccgcagaagagccagtcttctgtacagtattctactctacctgtgtggatacttctaactgctacgtatggtttttccatctattcttcctcctgtgtaaagtcttcaatactcaaaaaatactccccaatagtctctcctgcttgactgcgataaagtggtacccctgttttctcgtttttatgaagtccatattctgtcccatttagtgaaacccatacaatatcctgagtaaccttagttactgtagccttatcacaacctagtgcagggtctcgaagttccggttttgtgaatactatatccccaaccttcaatgcatccaatcgctttttgtctactaatgttttcttcatctattctccctcctgtttaatttcttctaagtcacaagggtgtacgtcttgctcaactggtcttaggctatagcgggagtcacctactactgtgtaaacaccatcatcgtatatatccactaattccactatcgtcccaatgtcaaaaccatggtcataacgagtgtttccgatgactttaaattgtttaggtgttgtataaccgtctatataagcttgtgctaatacatactggttatcttcaccaatccatacagctagtttatcatctggtgtttcatcgtatgtgttgaagtactcattagctaataaacttaacattgaatcgtatttctcaattgctcgtgcaacaaaatttggtatctctacttttgttcccatctaatcttcctcctatttaatcataaggtatacaaaaaataacataagcaaagcaacaccgccccaccccgcatttacatatgccgtatagaaaacgtatataagatacgttactgctataattgttaatactacgagtatcgtgttaaagagcttctctaaatcaatcattatacaacctcctagacctcacaagtataggtcgggttcttcttatactcttcctcctatttatatccaaagaactttaaataactttctgcttctttttctaagtgttcgtttagttcatctagggtaacaacttccccacagtcctcacaagtataagtccgactcttcttatcttctaacagttcaccatcacatacaaggttgatacagtgggttgcccaactccctacatcgtccggtaagtgccccattatacgtcacctacttttacagcaaatgccatgaaacgttcatccattttgcggatttctttctctgtaaaggtagggatatcttttaggtagtttgtaaagtcaggagaccctaatcggtcgatataactgtatccccaaccatctttatcttttgcgataatgatgtagtactcgtcttcttcctcttctaccgtatgacccagtacccatgctttggcaagtttctcatggttttctgggttattagctaaccaaaagtacatcttactagggtagcttcctttgtcaatcatgttaataaacgttaagttctcttctttgcacttgtcaatatattcccctactttataaggaataacaactttttcaggctcatctaaaccatatgctaaggagactgcttttgctatccctgcattgtagcctagagcatgagggttcaacgtaccatcacaccctacttgagtgaaaatctcatcacctaatagattaataaattcattcttatccatttaattccctccttaaaactcaaggctgttttcaataagttctgatagtcggagcatcacctcatgaggtaactctaattttgtactctcctgtgattctgcagagctgacttctaaagtgtactttacttctgttttctcatttacacgggaagccttcttctcaacacatactttataaagtgctgagttattgactgcgataattttttcttgtatatttacactagtattgctatcataagtaatttcatagctcattataaaaacctcctatttatacactggtacagcaaaagcccagtatctttcatcaatttcttttatttcttgttcagtaaatttgttcttacccatattaggcttatttgagaagtatacttcattattgtgggacttgtcaacccaaagataacaatcttcccctttattaccaagaccagtaaacacgatatggtaaagtggctctttctccacctcgtacccatctttcattcgtattaaagtttcaatagggttattcttactttggtctagccaacagtcgaactccgattcatgtgggtagctgttaccatctagcattctaatttgtgtaaaaatagctaggtctaatgcatgtttatttccctcgtaccattccgcaacaaactttggcacaattactttcttaggttcgtctagtttctttgctagcaaaatagccgccttgattgcctcattgtagcactggctccgatttgataactcttgaacgactgggacgtgactgaactttaactcttctaatgcattaatcaattcttgtttattcatttaatttctttcctttctttcaatagcccactggctgaatgcttgtaagacttgcaactgcgcaatttctgtcatgtatctataatttttataaacagggctattccgataatctggttttatagaattggctctcagtctccaaaatagttctataggttcaatatctgttaacgtatatttttcttttaaccaacccaaaacaatttgttgattctcacttagttctacttggtctaccttatcatcagtgtatttgaaccagattttctcatatgttgtttgtccgcctgtgattgttacaaattcggcgcttggttgctcattttgaaatttttctagttgttcttcgtaatgtatatccccaacatcaaattctttaaatttaatcattgtactccccctgttctaaaaaccaatcagtaaatgcttgaataacttgcgcttcctccgttactgataaagagtaatatgcctcttctgttttagggtcttcataggtctccccaatacgttcgagcgcctcgaatagggaatctttactacagtaacctacttttaaccattcaaatacctgtttctgatttttattcagttctggctttttaactgcctctactgcagtcttatacgctatttttaaaaggtctccttcaaaactattagggaaattaatttcaccatttgcttccatatacatataacaaactctatcaattatttcgttatatctttgtctactcattcactatccctcctcgtcctctacgtcaccccaaccaaagctacagtaggaagagaacacgtctctagctacttcgtctatctcctcattcgtagcattatcgggtacttctactgtctctacttcaccaatacctgcccaagttgtctcaatatatacatttatttttcgcatagtttaatacctaagactacatagtcatctttctgtgcataatctgtgatataagtaacttttgctttaacaaactctcctgtatatgacccacatgtgtactcatttaataaaagaatatctcccacatggtaatgcctatcatttttacgtatttcaaatagttttctaccttccttaactgctttaaagtacgtaggtgcaatcttgaggttatgagtaacttctaatttactaactaaatcaaaaatgatagtgtttaattcgttaccatctacctgattattcaatttttgtaaatttattgatattacagtaggtctacctcctctgctcccataaaggttattctgttggtctctatattcctctgaatcaataactaagtttcttctgttatgcttagtaagtctttccttctccgtcattgcctgtgctagtccatttattgttttagatacttttacttctccatttacaataacttgtactaggtatctgtcgtcctttgttgcaaacttattatccataattagtatctctctttcataatcttaattgaccagttatcgttgttactgaataccctttctaggtcattcaacgagttggtatttacaatttctttttttagttttctatctgaactaatattaccaaatcgtttaaggaatctttgtttaaagtgggcataacccatatagtcaaaggtaatagtgtgttctttaccaaatataccccgctctcttagcttaatctctacactctcataagaattatctactttcataaaattatttagaagagtgtgcaaatcaatacaaatagatgcccctgcactaccgcctataagtatatatttagggcactttatatcggggtaacaaggggcatctaattcataccacatattatttacgtctaccccataccatacactattcacatctactgatactctttctgtcttaaatggttttatgcaagtatacttcattgtctctcctccaaatcgtctaatacatcttctaatgttgtgacaaccccctgcaaatagcccagttcatgccacccataccctctcttatcttgctctaacaaattattaattctttttgttttacgtttaatttgacggttatatcttctttttagttcctcttcaaaggtcactaccttttttgcttcctctatatcttttaataattggtctagcccatctccattagtaccatagctatacactagcgctttctcgtccttataggtagttacccctaatgattggtatacatacttcttactggggacaaatacaagggtaatgggtctgtacaattgaggtagaagacagtcttctgataacccaccaaaatctgttttagaagataccttctctaccacgtacctcatatcttccatacttaacgacttaatacataaaatatatctgttaatgaccatttcctttagctccccctacacccaaaatagttttcgattctctgttggtttaaaagactccaattctcgtgaagtattactttttccatctgttaaaccttctttcactttatatattaaaaaaataaatctagctatctacaaatacattgtatcatcagctagattaaaagtcaacactttatatttaattattttatattacaatagttctttatctacaattgttttagggatagcccatattgtagtataacgaacccctttatggttacctgtaactaatacgaacgttgccgtgtctagcttagtaccgagtacagatgctagtagttcatggtcttctttgctaattggtacttcaaaatcaagttccccaagctctaccacaaagttatttgctctaattcccataaagtattcatcattacgttttacatggaatacattcttcgtatgaaaactttgcataacaatatttgcaaaataactgttatccctagctacaataaatctatctacatagatagcctctttgctgagtagttctccaatgcagttactcataacatattctcctcctcttctaatagtagctctgatacgtaaatttccatcattagactttgttcaatctcgtctagtaataaatgcatagcacacaagccacacaacatttcatctaaataaaaatcaccacatgtctcctctaatggtacttgacacattaaacactctatcattgtacagccctccttaatttaagttttctctaacttctgttagcacctctcctaatagattaagtccttcccatttactcatatcacgagagcgtgggtctgattcacgtaaccctattccccatactttatcaaaaggtgatgcctctgcaaacttggttcctttagggatggatagcataaagttacgtaaactatcattttgtgtgaatttataagtatttccatctaaaacgattgatttacgatgctttacccacaagtcttcttcaaaatttttaacttgtctacctaaacgtttagcatcttttgggctctctgtttttaaaattctttttgctgtatcgacatcattaaaaagcattgctttacgtaccatcatgtagtgttctgctgtcgggaaaataatgtcttctcctaaaccattaataggtgcactaaattgtgacgggtaccactgtgacaagcactcttttcctagtttattacgtttgcttggggtatgtccccaaaataaaatatatttactcatttaatgttcctcccaatattcatagtagtttcccttatgttcaaaaacaaaatgagggctaggtaactcaccattaacttctatatgctctgggttattataagaatagtagggttcgttaccagtaggactaattgctattactggtttatctttaaaaaatggtggtattttatctccatcatttaagtttaatttataggtacttaatggcacgcttctacgatgccctttcagtgttgtatactcctcaagactaattattctaaggaaacccttagcttttaggggtgataagctatctattgaaacgtcttcttgtttgtaagtgacaagggcgctataaatggttgaggggtttttgtatgccactgaataattaattgaagtgtgcttatggtttgctaaaaatttctctaattccttagataaaccataaggtgtatcgctatcaataacttttactttaatcatgtgttatcctccctatatgcttctctaactgttcctatactttggtctgggtctggtttactaaatggtaagcttgcacgctcttccttactcaatgtttttaagcaagccacatgtactgcaatgacccctgacttagcttccatactatccggaagtgtaagtatatagtcattatacagtttacttaacactagccaataacgattgctactacttttcatattagctaaaatcatcattttttcatagtaatcttgccctatacaagaaagtcctcctattgcagattggaggagctcatcttcaagagctaagatagtatttgcgtaccctttcagctccttgttaagcccctctatagtaatctcaaaacattctctttctggggagcctacagttaaatcaataagtggctcatatgctcttacttctctcccactaggggcttgtcttcgtttacctgtacgataggagtctttaaacccatactcggagcgtaaaatttcttcttgactatttctcccagacctacctccaaaatagtaatctcctactactccgccgttaccattataatgtcctctagttgttcctatgactttagaatgtctaatatgggttaactgacagagttctcctccattatccgggtcacctacaatagctgtctcacatacaggacagatatacccaaaacaaatcactttatctacctccaattaatatacattaagaaaaagttacaattttttcacaaggaatatcatagtatgcctttaaaccgtaatgttccaacatgtattctttagcgtaatctacaaggtgctcaggacatttaaatgtgtaagagccactcatcattacaccactattacttaactcttctctcgaagctttagcaaaccacttagcacattctacaggatacccaataacacaccctaaaacttcctcgtcattgaaccctagcttaattgattcattgtatacttctatactcatcttatctgatgttactaggtatatactaccatataacctcgttttataataagagcgttccagatggcttagctcttcttcccctaatacgattgctacacgatgacctaaattaaaatctaaaataggctttggaaaaacgtattctgctttctcaacaaactccacttagccaccccttttctcattccctaaattatcttaaatgctgtattagttagaacggtaagtcactattgtgttcttcctcttctgggatatataggatattttcaatcttttcttcaatatgtccaataatctctgtgtgctctttaattttctctttatgattttctctttgcttatttaactttgcatattgctgtaattcatctggtgttagctcttctagtctttttttcatttgttttctccttctaatgtaattttctctacgtcatcaacactaccaaaagatgggggttgtgtcaagttcttatttaaccagttagcgataatgtcatgtaactcgtctatagcctcatcgcttacttcatccgttgggtagtagtcctccgctacttccccatattcactgtatagctgttcccctacagattctaacatacctactacatctacactaataactgctttattgaactgccctactgcaaagcttgttgtccccttttcaggtaatgccccaaatatatcctctacgtgcatccctaagctatctacatatgtttttccttcattaatggacaataatgcaagttttcctgcagacactgcctcttctctcgtagggaacgtctcacacgctttccatacacctgtgtcttcctctagtgctaatgcatagtctttatcttccattgtcttgccctccctatccttttaatataatcatatttgtgttactgtctaagtgccatccatcaaattctaagtagtaatcgtgagggttaattggctcacccacaactacatagtcctctagtgcgtagccctgttcttttagttctaatagttcatctaataaatcttgtgctgttaaattattcatgccatgtagtatcctttctctttagcttcttcccactcatctacataaaacaaatgctctctccgagacagagagccataacagtttactgttaagtctaccatcaaaaagcccttatcatgttttgtccaatcctccgtatagggtgtcactgagtgtacttctttaatatactgttttaacacattcattttacatgcccctttcttggtttgaattttcgtgtttgtgttcggttgtttctactcacttctttgtatctacggattcctaatgccttagattctggacgagaacgacctatctgtcttacatataagtctagcgcttctcttactttatcatcatacatcttccctaattctcggaaatactcaaactcacctaaatccacataaggcatacgccagtcatctagggtagcctttactattgttcgtttgtttaaatcataattatagatatatagaaacactatataagcacctgtcatcacagaatagcttgtcctaatttcacttagagttacgctgtctcttaatgatgttaaataaccattccacttttttttacgttcttctgctaaagtttctatgaagtagtttacctctttttcgtccctcactacttgctacctccttgttgtttatgtctatatattatcatctactttgttatatgtcaacacctttgtaataaaaaaagaacctagtaatttacttacttaggctctcttgtttatatgtgtttagcaagctacctttactatcgacaacaacagcattaagctgaccaccatatgcacaggcaccatcaatgaaaatacttctatcacctaagaagacatcgtagctgttctcttttctcaggttaattgtgggtgtgtgacccattacaattgtcttatctgttttattcttctgtaacgctagcggtctcgtccaaatcatttcatctttagtagctgttttccaatcaggctgacgataaacaggtatccctgcgtgtacacataaggtgtctccatgctcatagtatggttctaataaactaattacttcaactacatttgttttttctaataacatctttctagtggtaaacgcatcctgtaggtgttcatctaaatccaatagactacttattgttttatcaccgccattgtacatccacattgcgtacatctcacttaggtcttcgtagtctgcttctcttatcaatgggaatgttaaaaaatctaataacatttggtcatgatttcctaacaaagcagttcctccattaagtatatgcttataaacgaaacccagtacttctgcggatttgctacctctatctacgtagtcacctaaaagtattaagtcctcttcatcactattccaatgtttattaagaagcattattagctcatcataacaaccatgtatatctgatacaataaatactttatctttcaatgaataatagcccctttaactacttctgctagccaataagtagctagtactagtacagtattgacaataaatgttattactatgaccagtgctaacttataatttttactcctagcattatagtttatataattttttatgttaactctaatatttttaaacaaagtgctcccatatacgttcagtgctatatatagtaaaagcaatacgataaagtagccttgagctagaaacacgtcagattctctgaacgagttattaaaccatatgctgaatatcgcaatcacttggtgaattataagcattgcgccattaccaaaaaggagtatactaaacgctataccgactacgtctctgtactctgaaagtagtctatcatatactactatccctttagtaaaaataaaagcaacaactgccatctgtatgagtaaaaatattgttacggctaataagttttctgtatgcatagtcataatttagccactcctttcaaaatgggtaaagaaagaataataggtatatcgttctttttctaccctaccctcatgtataaaggtaaactcaacaaatttaactcttagtggtatatctggtgctttctcccaaggaagtactcttgggaaatcatagaatactcttgtagggtaaacttctttcataagtatcctagggtatcttttctttggtataaatcttttacctattatacttgagtagtcaggtttcattgtaagtcaccatgaatagagtatgctctatttgctttgttaaagtttacttgttttttgtttactaatcttattgcatcttctaataaaagaggttttcctaatttatggttatctaattctggggagtctacccctacattcagtaagtttggttcgggtctggctaactcatgaatgtgcccatgtagattaattaggttatctctatctcctaaaattagtgggtaatgtgtcatatgcacaaccttatgcattcgttttaaaataataccaacgtcttcccaatgaaccctatcattcagggaagtattgcgtttaatctcttttcgtagaggactattatcgtggttaccctttattagccatatagtgccatttaagcgctctaagacgttagctatactatttaccttggcacccattgcaaagtctcctaggtgatatacaatgtcctctgggcgtactgtagcattccactctctaattaagtattcgttcatctcttccacatctttaaattgtttccgtgtgtccataaaagaggcttccccacaaatgtttctatggaagaagtgcatatcagatattacatattctctccccatacttgctcctccttagtgtgttgcaaaccatacgaatacagctagttgtagatagtgtactgtttggtcgataattagttgtgtctttttattaggtactgtttttaagaaccatgcactttgtgcttttaaatagtccatgataaaatgtggaacccataagcatactacaattagcccaagttttactggtgttcctaagaacaatgtagttgcgacaataatatacgtccagatgttcacatggatgattagtagatataaatcagtctgctttccttttgcgatatagtcactttgtaaggcatagtcccctactgcgtgagccattgtaaggataattacatagtataagtaatccaaattaagtcctcctctttatatggataaggacaagtgtcacattcaaatccatattcgttagatgctccctctaataaatctccgccacattctggacaagttgctagtttcattgttctgcctcctttacatgatttcaagatatagtcctgcacttggtgttgtagaaatcatcatgacttctagctctaagtggtcttcaataccttcgtattgttcaataagtgatttttcttctgataaagtgaatgttacaatctcttcatccgtcatatgctctactaatgtaactgtgcgaccaaattcaatatgctgtaatagatgtcctagtttaatcattatagtttccctccatcaattagtaatagtagaataccacctaataccagtaaccagaatactgctaagattagtaccatttagttgtcctccttgaacagctcatcgtataattcttgaactgcttcacgctttacttttaacattgcaatctgtgttgatatgatattacttggttttcccaccaaacgcccctctaagtgtccaatatccatattatattgaataagggtttgttgaaatttttttctaatctcggtgcattcattaattggttgcttcggttcaatctcaatcagttcaaactgtgaataccagtattcatttaatttattcagtagctcaccacgtgtttttccagattctgcggttgtcccatcatcatctttaataaagtaccctatagtattgttgtgagcaatctgatactctttgccccctgtgaaaaagggttcttgtgggtttgtaattacacatttcattctgtatgtcattttattaaacctcccattcctcaatgaggtattggcttttatagtttgcatagaaatctgagtcacttgagaagtatatatctagttcttttactttttctagtactccttgaagggatgtaccaactgccatgttagtacctgtccccttatcaattccgagatagagtgtaattttctttggttctgcaccgagcaattcaaacttagaatgccaatagctatttaattcagctaatagtaactcaggagtggctcctgattctataatgtctccctcatcatctctaaggaagtaacctctagcatcatcatagaatacatcgtactctttaccttctgtgaagataagctctgttttacgtgtacatctaatttttagtgtcatttttgctttcctccaattcaatttcttttattgatacaaagccaagtatattgcggaaagtacggtcttcattccagtatataaattgtgttagaagtggtttgtggtcatctgtgtatgttgtttttgtctcgtagtagctttcttcaatttgttcatcaatattctgtaccatttcattataatatgtgactgctttatcatatgaggtgaaagccctcatttttaccgctctatactcaaatttcactaaccatgctgagcttaatttcgtcatttatttcttcctccacttctttgattgacttgattatatatctgtgattctctctaaatgcgtggtaagcatcatcaagtgaatatgcgtataaccttgttgtttgcattacagttctatatccgttacgtccaaccattggttcgtcaacttctacttctaactcaaataatagttgttttctaatcattgtttttcctccccttttctatgatataatattaccctactattatgattctgtcaacaggcaaaaaaaaagaagtagaaaaatctactcctattcatcgtttgacaacttttccataccatatagtagctgtagtagtacatatagtacaatatcaaatccgccaagtggctttccaattactataactttaacaattgtcaataccgctaaaaaaataaatagccacccgattattttatttgcatgttttctaattctcataactttctagtacctcttcaatattctttctggtttcgttagctaacttaccagtccgttcaagccaacctctaaccatttctttttctactttgctatgtttgttcgcatcctccttgatgccttctacattttccatcaaattatctaagtcctccataacatctaataaagtgtttcttaattttaacacatcaatagacaactcatagttccgtttagacaatttttcgttacggataaagttcttttttagttcttgttgtgtttctagtagctgagtagttttaataatatcagcttctaatttactaattccgtctagttcattcatcacatgtcctcctcatattctactacttcctcaataattttcagtacttcttctgctgtgcctactgtgctatagtccgcaaagttttctgcaggtttcataatagccactgaatagggtttgttctctacatagatatgtccgaatccttttagagaatgaattacctctactgaccatccattagcgtactcttctcggtatactacttgctcactggttgctcttactggtttattcattgttaaaaccatagaagtttcttacaatgttttctacacgttccatgccctctaagtagctacgtttctcaggggagatatagttcttgtaatgagggacttccttctcttcctctacctcttttgtagtacgttcaatcagtttaacaagttttacttcattctctagttgagactggatgatgtctaacagttcatttttcgagcaattgtttagtggtttacttccatggtcaataattgtcataatagtcctcctattttaatgtgtattctttatatcccttatgtgtatcatgcccgcactttgtacaaaagcctgcttgttcaatatctgttgaagagtagcctgtttgtactgtatacgtttcataagtatggtcacacgtatcttcttctgattcatctattttctctaaacgaatagcctctccttctgccacttcgtggttaaagagcaatactgcagttttaataggctcatatatctctgggtggatggcttcattcatcttaaagctatttccgctaaattcattgaaagcatctagccattcctgactgttctcataagatacaattctgtaattcatacgaaagctcctctcgtgttttcttaaataaccaataccgttcatcaatttcttttatctctgcctctgttaaatagtagccttttaatttggatagggtatcttgactcaatggctcgtttctaggtaatatgcatactgctaactgcccatcattgcgtaatagtaacccgtagtctctctcctgtttctgaggcattactacatagtacttaggtaaactagcagtgtttgctactgcttgaataaaagtatctgtatttgcgaaaaaccatttactaaactctgacttgggatactcacatgcgtgtctctgcccttccaagataatttgtaacttatccataagttgttctcgttgtttatcaataaactcttttacctgttttggtacttctacctcattattcatagtttgtctcctttgttatactttgtcaatagtgatatacacatacttgccctctaactgcttaacaatatctagtatgtcatgaccgcctagcttaaatgtgtttgtctcaaacccttcgatagtaaaggaagaccaaccataccaaccttcttcaaagtccaagacccccatagatttaagtactatatttttagtgatgtcttctaatgaagtacgttctacagcagagaaaatctgaatctctgcgttatcaagatggtacttagaagaaatacccccatcgtactcctcttctgttgtagtgtccttagcccctaacgcatgtagtgcattacaaataagcatgtttaaggctctgtgctcatggtgatactcaatttcttttactttttcttttattaagtaaggttcgtttgtttctgcaccggggctgttatcaatagttacccaaccttttaatatctgtttacccatgattgctcatcctttctttagtatagcctatcgctgtcaccagtaaatctaaattttcctttgtcagagttactgttttctcatgtacacagtccggtctaaatacctctactgtacgatttattacagcaatatctacagtagcttccgttgtctggcttaccttgataaactgtttggaaaactccccacggctaacaccttctatcataagctccatttgtttatagcctcctctcgggaaagtccatgaaagttgtggaaagtacgctcttgtagttcatctaccgtatctggtagtgtacgaaattcgtctacccctagtgaaatacttgaagctacctcttcataataacatttaacgtctactcccattttaccataaggtaacaccattacttctatatgaaactcatatggagtattctgtgttaatggttcatctaataaccatgtctcatggtagtttactggaatatctaatagtaaactgtttaaatcatctagctgttcagataagtatgcaattcttgtcactttacggtcttctgctataggcattgaacaacctaacgtgtcttttatttctttaatttctttggtaagctcagccattaattcaattattttataaaacatctctattcctcctcttctatatattccccttcttctaagaaaaagcaagcgggttctccctctccattttcagtgtcacctaggtactcatcatctaagaatgcacagtatccagttgagtagagggttacacagtccttatgatacatcgaatcgtccgttaaccgcacaacctcgtccatctcactgaacacttcattacacgccccgcatgatattaactccttactcataggttacctcctttatctattacgtagtctaccagttctctaataacctccgcctcctctacactagagaggtctgcccaaacttgaagtgtcgcatcgttagccttaccagatattaaattgtgtaagctatctgcaatagttagctttgtacgttcaagatagtgaattagccagactaatacaattagctgtttctcagttagctcagtagtagtctctgtgtaaacctcatagttatctaaggttaatgggaaggtgtcttcattattaattacttgaaacccattatttggttctcgttcatactctccatgggtcagtctcttacctatttttagttttacatagatgtctctaccttctttgtgtagtttgtctaggtcactattgtaccactctcttgtttcaattttagtaaatcccataaactagccctccttgcttagctccttaattcgtttcttgatatttgcttctgtcttctcaagttgtctcattttgttagcatgacgagacatctcatgctcttttgcagtcactgccatcgctaataggttctctaaacttgctttatttgccattaaattgccacctcatagttaaattttccattgtgtttataatttactacagaaatatctgataatggggaatcaaagaagttcgtccccttcttccatggtaggacaagctttggaacctcttctggaattggtgcgtttacctgtttctctactagctctaaatgtcgttcgtaaatgtgtgcgttatcactcgtccaatataagttacctaactctaaccctacagtatttgccataaccaattgtaatgcatgatactgaataatattaaatggaagtcctaagcaaacatccgaagaccgagccttcacatgtaagtttaatttgccctctacaactgtccagtgggttgtccatacacatggttctaatgacatatcatataaatcttccacgttccataaagtagtcataattctacgagagtttggtgtgctcttaagttgttcaataactgcctctacctgatttagctttaggtatggttgatgtgttcctgctatccaaccgccttttttaggtactacttttgggatgagtgagcccgctttgcgatttttagctaactcaacatctccactataaacaggaataaaacgttctttgttaaataatgcgtaaccatacgcttttccaatagtgccatcttcttgctcccattcgttccaaatagttacacctcgttcttttaaccacgaaacctcgttagacatttcttgccaaatccactgcaattctgttagcgcccatttaatacctacatgcttactacgtaataaaggagctcccatatctggtgtgattgtaaagtttacaccttcaataaacttagttgttgcaggagtcccatcagcatatactgcacgagccccttctggtaattctgttactccattcttaataatatccattactaaatctttataaattttatcaaaatccatgttgtgccctcctacatttcttttccctataatagaaatatatcatatctaaatttaaaagtcaacaaaatattataaaaaaaaatatgagacatattggtatgtctcatatctactaaattctatactaaactggctagcttgtctaaagcgttatagtccgcatcggttactggttctactttacctaataagtacccattacctacctgagagaagaagtcatggttactagttgttgtagagataccattcattacaatagggtttacgtctgcgcttgttgttgggaataaagggttcatccctaagttagctagagctttatttaaattgtactccaaaaatgtattaacatcttttgtccaaccaatctcactatataattcagcagtatactgtgtttcgttttcccataatttaaatgctaaatcgattacccattgttccatttctttttgttcagtttctggtaactggttaaaccctaactggtatttatagccgatataggttccatgtacagactcgtcacgaataattaatttaataatttcggctgtattaaccatttttgcctcacccaaatagcgtagtggtgtgtaaaaacctgagtaaaataggaagctctccaacagtacggatgcactctttttctgtaatggtgtcccatttcggtaaatatcgttaataatattagctttatattgtaaacgtttattcgtagctacccattcaaaaatattgtcaatctctgtaggtgtattgaatgtgctaaaaattgttgaataacttttagcgtgtactgcttccataaaggcgatgttatttaaaacagcttcttcatgttgtgttcttacgtcatcgagtagtgagtgcacccccgattctgattgaactgtgtctagtaatgttaacccaccaaacactttatttattaaatcttgctccatatcagagagctttgcccaatcattaacatcgttacctacagggacacgtgtgtccaaccaaaattgctcagtaagctttttccatgtggcttggtcaattacatcatcaatcttattccagttaattccttcatacttttcttgcaaattcatgtgttcatctccttaaattgtacaactttcacactctgaaacccctacttcgcttccgtcttcttcggtgaatgttctaacataataaattgtttttataccttttttccatgcataatgtcttaataaagttaagtcccgagtggatgtagcgccaccctccaccttccaaggataaagattttctggtaactctgagcgcataaacaatgttaaactcataccttggtcaatatgtttttgtgccgttgcgtacacgttgattacgtcaatcatacttgtgttgtacgctgacttgtaatatggaattgtcttctcagataaccggggtgcagggtaataagttttacctgttttcccatcttgacgttcttcaatcatagagataattgggtgcaatgaagaagtagtctcattaacataagcaatactgccattcgtttataccgttactttcgtaatactttaacactgctcttagcagtcggactagactataccttatactatcccaaaatagtaccaactattatagtcgttggacgtccctcattttacagaggtttcgatgctgatttcccattgtattgcccttagcacctgtaacaaggcttttatttcagcataggctatctaactaattttttctgctttcgcaacattcacgctcaccgtttccagtcacgttgtagtttagttagctttaggaggttccagcaatttaagttgtttttgactcatattcacatatgagaaagcccaatattatttaggcgccacagctaaacggttttgatggtatagaccatcttcaataatgctgtttcttaatgtttcccaatcttttacattaggtagtaccactccatcgaatacttccgccaccttactagagatttcctgatttagtgttggtacatattcatcaaagtaagaaccgtctgcgtatttagagttctcaaagttatagaatgttgtgccacgctctttagcaatcttattacttgccaccaaagtagcatagttaattaattcaaacagagcatccgtcatttcaatagattcaggtgaaccatactctacttggttacttgcgaaccacgcatgtagccccattgcccctaaaccaattgtatgggctttatcattaccattcttgatagtaggtactgcttttatatttgacacatctgtaatatatgttagagctcttaccatcgtctcaattgatgccactacatcattagatgtttctaacaagttaaggatgttaattgaacctaaattacagctaatgtctgtacctaactcttcgtatacttgttcatcatttagcttagatggcgtctgtacctgtaatatttcactgcataaattactcataatgattttgccatcaataggattggctttatttacagtactaacattcataatatatggataacctgactcttgttgtaaacggctaatttcttcttccaaatctcgtgcattcattaccttacttctgatatttgggttctgaatcatgttattgtattctgaatcaatgtctacaaatgagaatggtacaccgtattctttagcaacatcatatggagaaaataagtgaattacatccccagactcagctagctcataaaatttatcgggaacaactactcccaaagaaagtgttttgatttgctttgcggattctgcattttcttttctagttgataaaaagtccataatatccgcatggaaaacatttagatagactgcgcctgcaccttgtctttgtcctaactgatttgcgtaccggaaaccatcttctagcattttcataacagggacaaccccgctacctgctccctcaattcccttaatagggtctccaagagctcttaaattacttaggttaataccaactccaccaccaagtttagatagttgaagtgcactgttcaacgttctaccaattgaagacattgaatcttctacttgaattagaaaacagctgacatactcccctcttctaagcctacctgcatttaaaaaagtaggggttgcaggttggtatctacggttaattagctcatctgcaatcttcatagcaagctcttcgtcaccatcacccattgtgagtgcattaaacgctactctatcttcataacgctctaggtatcgttccccatcatctgttttcattgcgtattgtttgtagaaacggtaagcccccataaatgtgtcgaatctgaactttttactatagatgaacttaaataatttttttataaattccattgagtacttgtcagtaatcactgttttatcgatgtacccttctctaataaggtaactaattttctcctctaaagagtagaaaaatactgtgttcttgtttacatgttctaaaaagaatgctctaacagcttctttatctttgtctaactgaatctttccgttattagggatattcaattggttattaagctcaatatatgtgttcatatctacaccccaagttctttttctagttttttaaccaaatcaggtctaacaccattaaatgagaaaccatcatcagcttctacatatggtaatgaagacactcctttttcttttagataagctaaagcttgctcatcatgagagatatttttctcatcaaatgggatattctttccatttaacatattttttaaaaataaacattgaccacacatatcttttgaatatactgttacttttgtcatttactacattctcctaacttttttatcgtatttattaattaaacactattttgcattaattgtcaaaaataaagaaccaaaaaaactagagactacaaaagttaattgtagccccttttaataagttacaccttgtcacctaagaaatcttctgattcctgcgatttattcgtaaccttatcaagtagtaaaacagaatagtttttaccagtttcaacctgcaacctattaaacactttctgatattcttctggtgtgtctgtaacttctaataagtattttgcatttaaaaatgatagtaattcaagtagttctgccttactacctgccatttgaactacaacgttaccttcatcgttcgtgtatgttccaattttatttctagtagccaaacaaatcagtccttcgtaaatttaatgtatttgttaactgtatacacatttttaactttttcccaaacgttagggtatacgttcatcaataacttagtatctgcgctagcacgtttgtactctggcattaatttaaatgtgcccccatcaatactaattttagattcccctaactcttccatatcagaaatgatactactttttagctcatcaatctcttctttaatacttttttgcaattcatataatttcttgtaagagcgtaagtccttctctagtagctcctttttttgtaaatctgttgttttcatacatatctctccctctcttatttctataataagattatagcatgtcagatatgtaaagtcaacacttttttatacaaaaagaattgcccattataaaggcaattcttgtccgttgtcttcttcaaaaagaatctctacaggtatattatataatttagcaagttttactctgtttttaacacgaggttcttttataccgttttcccaataagagattgatgaccagtgaactcctatcatattggctaactctcgtagagattcacccctagcctctctcactcttttaaggactttaggttttggtaccttttcttccatgactatccctccttattcttaaaaaataagagcctatcaggtagacaggctcagcatcaggaactatgcgaaagccccgatataagttactttaccattacatttacgtgcaaaagcctctaactctttacgagcacctaaacggtcaggttgcgaagattgaacagtaatttctttaggtaccgttacttcacgtgtacgaatttcagttttaccattttttaatttcttctcatactcctctgtacgagttgttgtcgtagaaatgattccataaaattttttcatattaatagctccttactgttttttttaataaattataatagtggtaatagggttttatgagactcctactcattgtaagccttccttaatagatacttacaactatacgtttatagacctctctcaaaaagtctccgtaacgtcttaccttcatcatttaaaacgtacacagaatttacaaaagttttatacccttctttttcagttctgtactcgtaaggtgaatttggcacacgagtgatttcttcatgtttagagttaagtaatgaaaaagcattctcttgctctaaaagaaactgtaccccatcaattaattcaataaaaggcttaacaataggttcctctgtactgtctttacaatcgtattttcgttctcctaaaatttgtagtatcatgtctatctatctcctctgtttaagtattaatttgtgagtttccactcacaatgctgattgagagagtcgaactcccattcccgggttacaaaaccggagtaatagccattatactaaatcagcgtaacccctcaatagagggagtttcttatactaaattaccatatccgtaggtatttgttttagcttgtttaaacatgatactcttgatagctaagtcattgtacttttcatcgtcttcgtcatcaaggtacacatcaacattaacgttcttacctaaaatatcgattgtttcatctttacctacttgtaagtctttactgttaaatgatacatcaaaatagatgtcgtcttcttttgtacgactactgaatgatactctatcttcaaataaatttaaacttcgagagttaattacaacaggttgtagcccaccttcaaattgaatagtaactgtataatactgattttcaatattaagaatgttcaaatcagcaatagcttcaccaaatgagatgccaaagcttaattccaacgcaattgctcgtaagcaatcatagtttaacttaattctacggctaaacttaacaacactgtcaatttccccatagtaagctttgtctaacttatcttgcaagtaagtacgaatttcgtctgcatcagggtagtcgaaacgtaaatggtaatggaaacgtcccggacgattaagcataaagtcgtttacacgatttaagttattaacagtaagtgcataaatacgcttgcgttgtgataacccatcgaataagctcaatagtttttcttgtgattcacgaccgtcacggtcattgaatactttttcaaattcatcgaacaagataagagactcttggtcaatactgtcaataaattctgcgataccaggataagcttctgtaattaagataacaggcataccctcttcaatagctcgttgagataagatttgagtaaatagtgatttaccaatccctttatccccacttaaaataacccctaaactacgattgattgttttaaatgtgtgtagtactttctcaattttaactaaacggtcaccataaactttagattctttcaatttaaaatcgtctgtaaccgccaatgagaacccagacattgggttgaatctaactttataagtttgcgcaggcaacttatcataagttttcaggtcgtttgcataaatctcataattactaccataattgattactttcatatattctctccttaatactttttaataaattataaatggagagtgatggagtcgcaccacccgagcctaagcaacagatttacagtctgctccgctactacttacggaataactctccttgaataaccaaccagataggtacctgacacacggacagcacctgtgtctctctgttactggatgattaattgtgtatttcgcatcacctaatatagttatcaaggtaggacttgactatactagatttagctaggttctaactataatttcctatgatagctcctactactaatcatatttatatacagttaaactacacataactaaaccgattaccttggttcgcatgttaagaggcgcaggcaaccaatggacattgcaggtctcgaacctgcgaccgttcggttatgagccgaatgctctgaccaactgagctaaacgtccgtagggtagtagcaacaattacaaatgctactctcctgatgattataaacttatcaaatcggaaagacaggacttgaacctgcgacatcagactcccaaagcctgcactctaccaagctgagctactttccgtgttacctgtttaatttggtcttttaaactactacacacaggtaaagataaaccctctgccaaggggagactatcatcgaaccgtatgtaagttacgatgggtagtagccatattatattaggttattaggaagtttacctatgcagaaggcgggagtcgaacccacacgtccattacagaccgatgtttctaagacaccgttgtctaccagttccatcacttctgcggttgtactaccaaggttacctctaaaaggctaaactcgtgtctggtagggagccataccttacatggattgcaaggaacctaacctcagtagcaccttttactattaagggtttctgatttaacgttttccctagaccgtaccttaacagtaatactggtgagaggatttgaacccctcttacctacaagcctccgacaagcgctatgggaaacaagcggtgcattaaccataactatgctaaccagtacactactgttttacgcagtcctcatactaataattcatgtggactcaaccccattcagggaagtgttagtctattttttggtgagaactggttaactccatgtacgtcaaacattccctagactactcacttacattgttatttaatgtcacatgacttatgacagccgtactcaaaagtttcaaggacttttacctcactatccaccgacagtatgctcggcaacgtctttctaataataaattacccatcactgttacagtaacagaaccattgaattaacgagcaatatcagtattactaaaagtagtctgtctgtgtggtacaagcactagcagtattacaacctatagtatgtctgtttgtcaatcgttaaattcttttacaggagtacttgttaaacttagggaggtataacaagtatgtgcacataacccgagtgctactccctaaagtagcctatacgggttaacgtagatggagggaatcgaacccccaaccgtccgcttagaaggcggatgctctatccgattgagctacacctacaaattatgggggtaatgagcccccataataactcatagtagtttcatctatcgaggattaaaatgaatatctaacttgaataaagtataacactatttacatagcatgtcaacacttttattaaaataaatttctatacctcactaatgccaatgactatacgtaaggagagaacgttgatggcactggctacttagttggagctaagttagtgaggtatagaaagagaactacattgaccgaatcgtattatacagccttagtagttgttaacaatgtttggaacttagtagcttactgcaataagctaccccgaagcatcggggtgggactgtggtaagccccaaacccttgggtatgctccatcctgcctccggagaagtcaggctcaattctcattagttaaaggtttactagttaacggttagctgattagtcatactacgtaaactactagtaaaatatagttttccaattaaggctaacaatcggtagaggatttgaacccctattattggttttggagaccaacgtgttaccagttacactaaccgactatgtaaagaaggaaagcgaagaccttctttacagtaattaaaaaaaacaaacaaaaaaaaaatacaatcatggaatcaaggtgggatgtaaggagatgccatgtgtccacttacagtggaataggtaactacagatttgcactgttttacatcttgtttaatggttacctgttaatagctaacttccagtgataagtcctcttatatggtagttcatgtagtatttgtttgacaatatggtagctagctaaaatgacgacagtaacgggactcgaacccgtgtgttccacgctgacaacgtgttgggacagcctctgccctatactgccattatttatgccgtagtttttttagaaaggaaagtttttttataatatacaacaacagttgaagcgctgatgttactacggcataaatatattttttatgagcttttaataactcaaaacttaatataatagggcttttactcctgcttcatgcacactcactgcattcggtcacacacccagagaggctgaactatcgggagctacccaatagcttctctctgcttttaatgtatggtctagcacggtggctaacaacgttcacctaaacattcagcattaaatagtattgttataagttcttcttatatcatatattttgtaagctgacttaggctacttgtaccaaggtctcttgttaaacccatatttctatggttctcgtcaaagggagtcttttgaggtttctaaggtctgccaagtttctcacgcttccacctaacttagattcttttccacaggaacgtctattatatcccccaagagtcttgtaccttacaatccatgtacactccacataacgcttaactgatactagcttttactagtagttactcttatgtcaccataagacatacctgctacctaaaacactatcgcactctaggctacattcagaatcacgccacgttatcctagcaagctgttcaaactttctgcactaggttctattatattaagttttcaattatcaaaagcagtttttctttactatttaataatagcacaacctctattattttgtcaactacttttttttagagagggtgcccctaattttatataggggcaagagatattaaacatagctgagctatgtaaaagctaatgtaggaattgaacctacttaatgtaagcaacaccagtttagcttataagcattgtttgcaaagtccatgctatgcactcagtaggaatcgaacctattgccgaaggtaccaaactaccctgagtgctcctatagatatattataccacataacgagatattaattttttttggtgatatagtatatctatattttttaaaattttagaaatacctttgatacattccggttatccaacgtatgaatatataatatcatgttattctgattgtgtcaataacttttttacatttttttataattgtgtaatgtcctatttctttttttctgattccttatatttataatatatactatatagtactatatatatatattaattactattagatattatatatagataataagaatctaggaaatttaaaataggacattctaatgctgactcagttacaataaacttatggtggctacctttttacaaaaatgtcctatttcattttttctatctccttatattattatttataatatatagtattaagtattatatattattatatatatatagtatataatataagaaagacaaaaatttaaaataggacattttacttaaacaaaaaaaagagagcagttaagccctcttatcttaatgagaaatagttattaattgttcccaatctgacttcctcatcttctggtgtttcatcctctggtttcgtatacaagctagtgattctttctggaacatctactacgttctcagtagctgtctgtatctggaatgcatttacataagttaactcagaatctctatcagctagtttatgaactggaatcattggcaactctgcacctttcattgcaccatttacaattgacattgcatcattagttgttacaccaagtcttctagggaacacagaatatgtcccagatgttaatgaaacctctacaactttctctcttttagggtaattcatgatacttctcctttcaaaatatgttataataatactatatactataataacacattttacaaattacttaaacatgctgaacacgtaagtgacaactgctcctaagacaatcataaaaacgttctctacaatatccctcttgtggtcgaactctttatcgtttactccttccagtgcatctatagtttcttccaacttagtaatctggtaggttaggtgtgcatatttttcttcgtgaacagcaagtcgcttatcaagactattgacaatatctctcaactcactaaccgcactattcagttctacattgtcctgtttaatgcccttctcggttagctctccatgttggagtttatcttccagtcgttgtagtcttaaaacaaggtcatttacttggtaatcgttcatatatgctcctccctgtaagttatgttgctctatattagtcagatgtaaaccacagacagactaatatacctataatagcgcctaccgtgtagactataggtatatagtacccattaaaaaacaagtatagactacctatactaattccatagagcacgaaagtgaacttgtatgatgccaaagggctcagttctgcttgtagtttcttatactgtagtgcacgagtgacatagtaggacatcaagtaaacaaacatttgtagtaacagtacacagaccagtgctgtttcatacattatgttgttccctcctctcccttagagctactattaatatagtacactgagctgttagcaaacaggtgtgctaaattaatatagagactaaaaatgtagacgggagagtggtaaaaatggataatagcaaacgaattattaaaaaaattatttttattaccatctctgcattagtcatggttactttaagtaagctgttctctaaatatgttattgtagaacaaaatgccccatttcaggcattagttggcggtgcctcatgtgcactgttatctagtattctgtttgactggtatactaataaaaagaaaaaagagaacgtagagaatcaacttaaagaagcaatcagtgacttgcagaagattaaagctatcataaaaagatagcctattaggaggtgggatgggtgtctattaccaataaagacattaaggataaacgtagatatatttttagtcaatctagtaaaacaacaactataaaaagaggggacaaacgcataagtagtgcaacaagaatatgtgcagtttgtggaagaccgctatctaagctcgtattaagaacaggcgtaccaacagtagtagtagaccatattagctgtaagatttcagacattgttagactaaatgtctgtgaggatataaggtcttgttatgcgtattctagtaagaaaggggaaagctagctaatgggtatggcagatagacttaaagataatgcaaaacaaaaaaagttagaaagaacaccagagcaacaactaagagacacatttaatcaagcttcaataaagcttatcaatcaatttatggctaacgttacatcaggtgctatagaagttgatgatattgcagatttaacaaggctatttcagatttatttacaggttaataatataaatgatggaatgcaagaaggtacaggaactctacctgcacttacatctgagcataaagacatcatatctgaaaaggttagcacagaaaagattattaaggacggtgaagaagaggagctaatttctcttgatgagttagccagtcttccagatgaccaacttgaggaagtcttagttaacagagagctacagatgaacagagagaacgaggcgaccttctaatgacgacaaaagcacaacatatagctaaaatggctaaagagatgtatggtacagataaaattacaacggagcagttagcttatataacagatatgctgaccccatcaacgtacctattgagaaatcactctgtgcgtaatcacccaataacttttattatatcaggaagggatgcaacaaaagcacaggcacatcgaccttggcaaccaaagataataaatgaccaacatagagacaaggcaataattaaatcaagacagctaggactatcggagatgggcgttggttctatgctacagtttgcagacacacatagttatgatgctgttaaatgtctttatacatttccaacgaatgagcaaatgactaaatttgtacagacaaggttagaccctgttttacagaatggatactacagcacaattgtagaccaagaagttaactcattaaaagctaaaaaaataagaaatagttttttgtattttcgttcaagctcaaaaccgggcgctgtagagggtgtcgatattgactatctatctatggacgaatatgaccgtgtacctgcattagcagaggcttctgcgttggagtccatgtcttcttcaccttataagatagttaacagatggagcactccaagtgccccagatatgggaatacatgggctctttaaagggtcagaccaacattggtatttacataaatgtgagaaatgtaattattataacgaaatgagttatgatgcatatacaccagaggctcctgtagagagtaggggtaacattctttgtgttaacccaaaaggggtcgatgttgttgctaaaacagtagttgacggctcattccagtttgtttgtcaaaagtgtggagaaccgttagacagatggtacaacggtgtatgggtacctaaataccctgatagaacaaaaaatggtctaggtactagaggatatatgatttcccaaatgaacgcagtatgggtaactgccgaccagttaaagaccaaagaacttcaatcattatctaaacaagccttttataactatactctgggtgaataacgccccttcaactggaaacagttgtcgaaaactctgttaaacgggcataggaaaataaccaatatcctgataagagaccctgcctcctgaaaaggaaagagggaatcccgtgctaaatcaagcgtaagcttgtaaatgcctaacgactaaatttctaggtagctaaccaaatggggttagtgagaactagataagaactacaaaacattctaagtatgctattataattactgagaggtgattagatggcaaagaaacaaaccactgaaacatttacagctcgggtagctgaacttactaacaatgaatatacagttgttggtgaatatgtaaataacaaaacaaagatagctataactcacacaacgtgtaacaccacttacctagttaaaccaaaaggttttttggatggtaaccgatgccctcattgtagaaataagctacgaggagctaagcaaaagacacaagagcagttcgcagaagaggttacaaacttaacggataatgaatacatcgttgtaggagagtatacaggagctactaacaaagtagcaatccaacatagaatatgtggtaactcatggagagtttctccgaatagttttttatcccgaggaacacgatgccctacgtgcgtaaggaatacgacagcacaggagcagaggtactctacagagcagtttatcaaaaaattagaggaacgctttccgaaagaatacacattattatctgagtacatgggtagcaagaaaaaagttttggtacgtcacaaccgctgtggtaatgagtgggaaatcaaagcaagtcatttgctacaccataatatgtgtcctaggtgtaagtcatcgagaggtgaagcattgattcggaagtatctaacaaatataggtttggaatttacagaacagcaaacctttcctaatttagaacttaaaaaaccattatcctatgacttttatatacctagtcagcagttgctgattgaatatcaaggtatacaacactatgaaccaatagctcacttcggtggagctgaacggtttaaacttcaacaggaaagcgataaaagaaaacgaaaatacgcaagtgagcatgggttgctattagtggaagtaccttactcactcgatacaatagaaaaggtatcggcatacttagaaaaggaaatcaaatttgtagtgtaaagcagagcaacctaaaccaaaaagtaggttgatgatatagtctagtccgactgccaagagcagtaacaaaatactacgaaagtagcggtagctcgtatccttacgcagacttgaaattaactgttaacgactctgacgttgatagccataagagaaactatttagtagaacctgctaaagacagaggtgactataaatttatatctgttggtattgactggggtaacagacattgggtatctatacatggtgttaaaacaaatggtacggtagatttgataaaacttttttctgtgggtaagtccaacccgctagaccctaatgcaatagatgtagacatacagtctataaaattacaactagctccttacaatccagatataatcgtagctgacgtaggggactcaggggataaagttgctaaacttatgcaaatttatggaaaagaacgagtttttgggtgtgtctacccatcaacccctaaatctactggtaacctagtacctacttggagcccacaagcaaataaagtatccgctgacaagctaatgcagaataaacgttacattaacaagatgaaagaaggagaaataggttactactcaaaaccagatacagagcttaatttatataaagagcactggaagaatgttgttatacgtgatattgaggacgaaaagacatcgacaggttttagacaaattatcggcagaaaaggtgatgaccactactcacaagcaagcgtttattccatgttagggtatgagtacctaatgaatgtatttacaggagtaaaagagtatggatttgactctgattgggtgtccactcagttagcacctacgaaacctgatatatttacagaatttgtataggtagattgccttatttagttttagtcaagctgaataaggcattttgtattgtttgatatatatttttgtggtataataaatatagttagggggatagttatggtagacaacaatgtaaaaataagtaaaagtacaattgaaggactaataaataagtctttaagttatgagtacgttataaaaaataacgaattgctgacaaacgaatatcaacatattgtaaaagcgtatgggtttgacaatttttatgacatgtatctatatgcagatagctgtgattctaaagatatgtatttagtaaaaggtggtcaaaaagacttgtctaagctaaaacctgttaaaagaaaagttgttagaaatggtaaaactatgactacaactatttatgaagatacaggcagttcggacaataataacagtaaccctttagacaaagagagtaaaaagaaaaaagagttagaaccagttaatgctaaggaactacgtaaggttagcttaggtagtgatgaagaagagaagttagaccctaaaaagatagcaaaattgctagcagacactaaaaaatttggaaataattttgatacgcagtgtactgattatcttattcttgaacaagactctgttacacgaggagtggtagggtttactagagaaggttcttatttaaaaatgtctttctcaatgtcagatgaggctgttgaaggtatgaagatgttagctttttcacagctcacattaaaggcttggaaattgggtctaggggctaagataagcacagataatgcacctgatgtagaggaactaattagcttatatggatacaaaagaaataatacagagtatattgtgtcaatgagctcactgcgtagtcttctaggggagccttagtcataagtgctacgttagtcattatactagtattttcaactattatttttttaatttttaatttactagtaagtaaggtagttaaagaattttataacttaaagatgctagcaaaagagggactaacagataaagtaacagatataacaaatgatataatgcatatattgaaaggagaaataaataatatggaattaattatgaataataagaaactagatgaattaactaataaggtagctactgatgaggactacgatatttttgtagagaagatgggtaagctagttaaagatttgtatgagaactaccagtttttacaacaaaacccaccagaaggagactacacatcaggttattttttagggttccaagtaatcagagcagaatacccagttgagtatgagaatttatttagattagctgtagataaaaatttaaatgaactagagataaacaagagatttgtcgaagctgttaaggatggtaaagttttaccactaggtgaggctatcattgatgaattacaaacagggtgtagctctatactacaggcacaagaagtacgtgtaaatattgtatttggtacaaaagaatatatggctaagcaagaagaagagcgtaaagaacgtcaagctaagttagaagaagaacgagaaagagctatggaagtactaaaaacaaaagatgacgtgcttaacacattaagagtaactgaggctttggctaatgaattaacagatgaagtcgcagaaaaatatgatttaatggagctagttaacagtatgagagaggggctgaaagctcataatggaaattaaaaattctttggggaaagctcttataaaaaatttaagattgcttaaagaaaaaagagatgcaatgcccgataacttagaatatacaagtcaagttatgattcctgtgccctactatctaataaaaaaaggggataatgcagtagaatcattccttatgtgtgcggggatgataaatagggataaagatttaggtctgcctatttctttagagaaaggtaagcaacaagttaagcttaacaatggagaactgacaactattgtagaatgtgttgctacttactcagataaaactgatattgacggtgtagagagattcttagttgaacatctataaaaattaaattaacgagttctattttgtgctatattagatatgcatgaaatagaactcgtttcttttttatgactaactaaggaggtttaatagatggcaggagaagtatttagtagcttgattacaagtgtaaatcctaacccaatgaacgcaggtagccgtaatggtatctctattgaccgtattattctacatcataatgcaacaacaaataaagatgttgctatgaacacgtggctattaggtggtggtgcaggtacgtctgcgcactatgaagtcacaccaacagaaattatagggtgtgttggtgagcagtattcagcattccatgccggaggcacaggtggtatagatgtccctaagattgctaaccctaatcaacgctcaatcggtatcgaaaatgtaaattcgtcaggagcacctaactgggatgtagaccctagaacaattacaaattgtgcccgtttagtggcagatatttgtaaacgttatggtattccatgtgaccgacaacacgtgttaggacataacgaagtaactgcaacagcatgtcccggaggtatggatgtagacgaagttgtacgtcaagctcaacaatttatggtagggggctctaacaacgcagttaaaccagagccaagtaaacctacaccaagcaaaccaagtaacaataaaaataaagaaggagtggcaactatgtattgtttatacgaaagacctattaactcaaaaacaggagtgttagagtggaatggtgatgcatggacagttatgttttgtaatggagtaaattgtcgtagagtatcccacccagatgaaatgaaagtaattgaggatatttacagaaaaaacaacggaaaagacatcccgttctacagccaaaaagagtggaataaaaatgcaccatggtataacagattagagacagtatgtccagtaataggtattactaaaaaatcttaatactagatttaagaccatcttagggtggtcttttttctttctttgtaatattcgtaataatatgtaatggctatgtaaccgcttgttattttggctgtaacaattacatgttatattagttcttgtaagcaacacaaataaagaaaacattgaggagaattttattttgaagaaaactagtattttaggtttaagtttattaagtttaggtttagtagtaggtttaggaaccgaagctaaggcagaagaagtaacagagaatggtaagacatattggaaggtagagtcaggagacacactatcagaaattggagctaagtacaacttagatttcactaatatccacaaagttaataaaggtgttgtagctgaccctaatgttattttcgtaggtgacaaattgttattacctttagatgaaaatggcaagctagtggaacaagtgaataccactgaaccagatattgaagtacaatataacgaaccagtaacacctgaacaacctgtagttgtagaacaagaagttgtagagcaacctgtagttgtagcagaagcccctgcccctgtagtagaggtacctgctgacagtagctcagcaaaagagtggattgcacaacgtgaatctagtggttcttatgatgcaacaaatggtcagtatattggtcgttaccaactatctgcctcttatttaaatggtgactattcacctgccaaccaagaacgagtagctgatgagtatgtagcaggtcgctatggctcatgggagaacgcaaaatctttctggttagcaaatggttggtactaaaattaaatagcaataaagacctctttattaaggggtctttttttttatgctatattaatatatagtaaatagtaatataaaatggttatgattagttatgtggtataatagacttatgttaaaaccatttaaggaggggaaacatgggttatattcaagatgagacatggcagatggttaaaaaagttgctaaaaagaatgggtttgttggtgactggattttaattatccactcatactatgagtatggtggaaatcacgtccagatacatacaacaataaacggagaaagctatagaattttaagattgttagatagcagagagatacttttattagatagaaaaggtaaccctgtaatttatgactatgaaacagttaacgatggtcaaaaaagcttcttttataatgatatggaagagaaagaaatcgaaatacctaatggaagatgcttaaacgataagacaaggataaaaatttatgtataaggtaggtgtaacagttgccaaaatggttagataaagcactgggtatagaaaaatcgtccatagaagaaactaggaatatggaaaattataagatgcatttaagggaaatagacaccaatgtggtcaataacgagccgtacagtatggaaagtattgaaaaaggtatgaatggtaagaccactgcatatatgcaaccaattattggagagatgtcagtaaaccccgggtataaaactaaaccgtctatacgtaactctcaggacttacataagacacttaaaaagtttggtaataacataatattaaatgctattattaatacacggtcaaaccaagtatcgatgtattgtaagcccgcaagaaattctgagacaggtgttggttacgagatacgtttaaaagatattgaagcagaacctacttcacatgacattgctaatattaagcgtattgaaagttttttagaaaacacagcacaatttagagaccctaatagagataattttacaactttttgtaaaaaacttgttcgggcaacatacatgtatgaccaagtaaactttgaaaaggtatttgataaagatggtaactttatcaaatttgatactgtagacccaactacaattttcttagcaacaaatggtgaagggaaactaattaaaaacggtgaaagatttgttcaggttgttgataacagaattgttgctaaatttaatgagagagaactagcattcgcagtacgtaacccaagagcagacatcgaagtaggtcagtatggttacccagagttagaaattgcgttgaagcagtttattgcccatgaaaatacagaggtatttaacgatagattcttctcacatggaggaactaccagaggtatcttacatgtaaaaacagggcaacagcagtctcaacaagcactagacattttccgtagagagtggagaagctcactagcagggataaatggctcatggcaaatacctgtagtttcagcagaagatgtcaaattcgtcaatatgacaccctctgccaatgatatgcaatttgaaaaatggcttaactacttaattaatgttatatctgctttatatggaattgaccctgcagagataaacttccctaataatggtggtgcaacaggttctaaaggaggctccctaaatgaaggaaactcaaaagagaaaatgcaagcttctcagaataaagggctacaaccccttttaagatttatagaggacaccgttaacacatatattgttgcggaatttggagaaaaataccaattccaatttaggggaggagacctaagtgctcaactagataagcttaaaataattgagcaagaaggtaaagtattcagaacagttaacgagataagacatgataaaggtttagaaccaattaaaggcggagacgttatactaaatggtgttcacatacaagctattgggcaagcgttacaagaagaacagctagaataccaaagaagccaagaccgcttaaatagactattagagctatctggtggagatgtagaacaaccagaaccagaagaacctaaagacagtcaaaatgatacagatgtttcatttcaggatgaacaacaaggtttaaatggtaagtctaagaaagttaatggcaaggtagatgacaatgttggcaaggacggtcagttaaaatcggaagaaaacaccaactcaactaagcatggtactgatggtataaaaaaataataaaagataatggagggggttagctccccctcaactttgtttgtgttactagatagtacatgttctgctatattaaatacagtaaaacgtttaggtggtgaaaagcaaattgtcagaagttagagaaaaatatagtattttcgtaccactggatattgaaaattctatacagaagtctgaatctgtgaatgatggtgaatggtatgtgcaaggatatgcaactaccccagatttagatttacaaggagatattattttaccacagggcattgatatttcttattttattgaaaatggttggataaactatgagcataaaaatgatgctgagtttattataggtgccccaactagcaattgttatgttgatgtggacaaagggttattcgtagaggctaagctattaaaggataacaagtacgcacagtctatgtggaagctagctaatacaatccagaaatcaggaatatctcgtcagttaggtttttctattgagggtgcagtagttagtagaaatgcacaagataacagaatcatagaaggtgttaaaatacataatgttgcattaacgacacatccggctaacccaagagctacatgggagacactagttaaatcttggactacaggatatggtacagcaccagatgcacaagtagatgcaggcgcacttagaagagagatgtttaaagaggacatttctaatttgacgtatgcagtaagaactattgcagggctatatagtaaaaaacctgcagagaaagaatttattttacgtgaagtagctaaggatatagaagtagacacttccgaaaatgaattatctaaatttatgttacaattaagtagagggatttccttgaaagaagcaacaaactttattgaaagaagaaaggggtaagaaatagtggctaaaacattgaacgatattatagaagattttgatgcacagttaaatgaaaaagtaaaacctactacagatgaggaaattacaaagtctgtagaagaacctactgaaccagaaaaagttgaagaaggtgctgaggttgagccggaagaaaagcctaatgaatctgaggaaactgcaggcaatgacggagaagaatccggagttactgaaacagttgaagcagaacaggaagagccagaaactgttgaagaagtagcggttgaagagcctgtcgaagaatcagcagaaactgttgaaaaatctgataaaactaaagaaaataaagatgaagaagaagaggaggaagacgaagaagacgaagacaaaaagaaagaaaaagacaagaaagacaaagataaaaaagacaaagaagataaagaagacatcgagaagtctaccgaagtcgaacaagttatcaaatcttctgaaatcttaggggctatggaagctatctttaaaaatatgttaggtctaagtgaaaagttagacgaaattcatagagagtttaaagaagctaaagaagctaaagaaaaagacgaagctgaatctgttgagaaatctctacttgacaaccctgaaattaaaacaggaaaagaggactcagaaggcaaggctgttggatttgttaataagtctgtagcagttgaggaagaggtagctaccgaagaaccaactgtagatgtagttgttgatggtgaacaagacacagcagaacctgaaaaagaagtaccgttccgtgatagagtacaggctattagaccagactttatggaaacatataaacgtgtgtctgttagcggagtagctcaacgtggtgaattagaatcagttagacacacttggggaactgctagaacaaatgaagacctagctaaaattgaagggtttatcaataaatataaataattttactatatagtgaacgatttttaattgtactgctatattaatagcagaaacaataaaagacctgacattccctcctgaacctccacagggtcaggtcttatattgagaggaatataaagaaaggtgatttatacataatgacagagaaaaagaatacagaacgacaattaacttccgtacaggaagaagtaattaaaggcttcactacaggatatggtattacaccagaatctcaaactgatgccgccgctttaagacgagagttcttagacgaccaaatcacaatgctaacttgggcagacggagacttatcattttatcgtgacatcactaaacgtccggcaacttcaactgtagctaaatatgacgtatatctagcgcatggacgtgtaggtcatactcgttttactcgtgaaatcggtgtagcaccaatttcagaccctaacttacgtcaaaaaacagttaacatgaaatatgtttctgatactaaaaatatgagtatcgcaacaggtttagttaacaacattgaagacccaatgcgtatcttgacagacgatgctatctcagttgttgctaaaacaattgaatgggcttctttctacggtgactctgacttatcagaaaacccagatgcaggttcaggtttagagttcgatggtttagctaaactaattgacaaacataatgtactagatgctaaaggtgctagcttaacagaagctttacttaaccaagcatcggtattagttggtaaaggttatggtacaccaacagatgcttatatgcctatcggtgttcaagcagacttcgttaaccaacaattagaccgccaagttcaagtaattagcgacaacggtcaaaacgctacaatgggattcaacgttaaaggttttaactctgcacgtggtttcattcgtttacatggttcaactgtaatggaattagaacaaattttagatgaaaatagtatgcaactacctaatgctcctcaaaaagcaactgttaaagctactttagaagcaggaacaaaaggtaaattccgtgatgaagatttaacaatcgacacagaatacaaagttgtagtagtatctgacgatgcagaatctgcaccatctgatgttgcatctgtagtaattgacgacaagaaaaaacaagttaaattagaaatcactattaataacatgtatcaagctcgtccacaatatgttgcaatttaccgtaaaggtttggaaacaggattgttctaccaaatcgctagagtacctgcaagtaaagcagttgacggagttatcacatttatcgatgtgaacgatgaaattcctgaaacagcggacgtattcgttggggaattaactccatcagtagttcacttgttcgagttactaccaatgatgcgcttaccattagcacaagttaatgcttctgtaacattcgcagtattatggtatggagctttagcattacgtgcacctaagaaatgggctcgcattaagaacgttaaatatattgcaacaggtaacgtatttaacgaacgctaatctttagaagactaagcaaaattgaataaaaatggaataggggacggttaatactgttccctatttttattataaaatacatgtatggaggaaataatatgttaaaatcagaaatcttaataaataaaacagtaacaacagcttttggtgaggtaacatttgaccataatggggaaaccacagacctaacagtagaacagcaagaacatttagggactaaagttccatatatacaatatataccagatgcacctaaagctaaagaaaaagaagctactgcagaaaaagcagacgaggcacctaaaaaggctaagaaagcgcctgctaagaaaactacaaaatctaaaaaagaggaagactaaggaggtatttatatgtacccagactacggatacgaggaacaaggggacaatacataccaataccaaccatatgcacatgggaaccctaagcatatagatttagacaaaattgatgatatacagcctgccgattatggttggacacctgctacgctgaaacaatacatgtttggtgtagaggttgttaaccctgaaacaggagaacctttaggagatactttctatgaacatatcatagactcagcaatagctaaagcagagaaacgactagatattgctattatgcctagacttataagaggagaacatcatgattaccaccaatcagatttcaactcttacatgtatactcatgtgtttaaaagacctattattcaagcagaaaagcttcaattagaagttaatggtagagggctatacagatacccgtctaattggtggaaagtgtatgcactagcaggtcatatacaaatgtacccaacatccctcatgcagactggaacacagtttggttatgaaatgacgttctcagggtacccacaattagcgggaatgcctccatcaggggggcaagttgatgctcctcaaatgattcatattgactatgtggcaggaatgctacctaggaaaaatagaggatacaatgaagactgggagtgccctgcggacttagaacagcttgtaataaagtatgcgttaaaagagatattccaacaatggggtagacttataattggtgcaggtattgctagtaagtcactaacagtagacggtattagtgaaagtatacaaacaacacagtctgctatgtatggtggtgcttctgcagatattcgacaaattgacgaagacatacaagaattagaaaaatcattggtatcttactttggaatgaacttaggtattatttaaaaaaggggggttaacaaatgggtgaaaaaccaattagatttggtggagcaggtgaaacaggtaaccctaacaagcaattaaatactagtagggttgaatttgaaacaaaaggtatggctagcttcattgaaaatagaggtattgacgttttgtgggaaagagcatggctatgtacatgtcgtaacccaatgaccctctcacctaagtcggattgccccatctgtaggggaagagggattgcttaccaacctgcagtaaaattaagaatggctatacagagtcaagagaaaggtatttctaatcaagatttaggactactagatacaggaaccgctattggaacgactgagctagattctaagataacctttagggatagaataacagtccccgaagttaaaatatatcaaagctttatttttaatgtaaataaaagaagagtagctaatggactatttttaagctatgatgtgaacagcatagaagatatttatggtaaagacggacgtatcttagttgatggagtcgattttagaatggactatgacacaaatactatttacccaaatgaatctttaatagatactaatatatccataaatatgtctgttacacttagatatattgttatagacctgttaaaagaaagtagataccagtataccacatttggtgttaaacaaacacaatttgaatcattacctaaaaagctcttattgaagcgtgaggacgtgtttattgatagtgaaccattttcattagacatagatacagcaagccgtatggaagagctagagggcaaaaaagatacaagtgaagctatggtagaccctaagcgtaaagctacaaaatcaggaggcttctttggaggtaaattaaatggctagaaaaggacagagacccgtattgtttactgattcaaaagcaatacttggcaatctaactcgtgcagtggttgacgaagtactaagtgatgcgcaagatgttgctctacgtaatgggtcttctgtacagagaatgcctagctatttgatagtaacagagtctaggatggcaaaaaatggggttatagatttgaaacctttctttgcacgttctaataaaaagaaatataataaaaaaggggaatggtacctatacatccctattagtatgaaaacacgaaacatgtcaagacgattatacgatgagttgagagcagttccagtaggcacaaaacctgtaactgttaaaatggactatctgtatgatagacgaaagcagagcccatcagtgtctagtattaactacaaacctaaatctactaatgtaactgttataccacagagttggggtaaaggtacacgtaacacctatgtagctttccgtacagttaacgctaattctcctgcgaatagttggataataaatcgtagaaacgttaatgatgatgatatgagtaagacaatgctaagaaacatagacaggctcatgaaatggaaactaaagaatttaggaggatagtgtatgataccaagtttagacacttacttgtataaagaatttgaagaaaggctaaggacaattctatcagagtgctatattatagacgaagctttaaaggggatggacaaagaagctttagaatcttttaaaaacacttattgctctatagatggtaagccacctaagagagaagtagagatgtcctattcattcccacaagaacatctggattcatttgctcgatttgtagtaactctcggtagtagcgaagaagatagcaagtctattggaggaatccaaggaggctacgagtatcgagaaggtaatgtaattagtgaggaagccactattattagagaaggtgacaagctaattataaatacatcaaaaccagtagcggactatctaaacagctcagatataagttttgcagaaagcgaccattttaggattgaagataacaaacctgtatttgatttttcatataatgaggagttagaaggtatatccattaatgtgtcgtatataagcaaagtatcagatgatgatgttgcaggtgtatacaaaggataccaatctaacgataatgttagtataattggaataagttctaatatagatactgctaggtgtttagatgcaattgctagaattatactaatcaccatgagagacagtttagatgaaaaaacagggtatatgttgcaaacactacattttggtgatatgcaagttgtcatagaatcaggtgaaacacttgtgtttggtagaccttgtactgtaaactacagagttactaattctattggatttgatttacaacaaagaatcacagagattattacaaaaaggaggatgaaatcctagtggctaaagaaacagagaaagtagtaaaaaaagaagttaaaaaggagcaacctaaaaaacctaaaggttatgtccatgtcgatacatttttagattatgcaaaagtattatatggactaaataaatatcaggtagcgggtttcagagcactaatggcaggtagagaataccaacacgaggatgctgattttgttccatttttagaaaagtatataggaaaggaagttaaataataaatggctgtagaacaattcccaagaaaaaaagtatcacgtccacatactgagattaccgtagacacaagcggtattggtggggcatcaagtagctctgacaaaacattaatgttagtcggctctgctaaaggcggtaaaccagatactgtttatcgtttccgtaattatcaacaagctaaacaagtactacgtagtggagatttgctagatgctattgagttagcatggaatgcatctgacgttaataccgcatcagcaggagacattttagcagttcgtgttgaagatgctaaaaacgcaactcttacaaaaggtggtttaacatttgcttcaacaatttatggggtagatgcaaatgaaattcaagtagcattagaagacaacaatttaacacacacaaaaagattgactgttgcattttctaaagatggttataagaaagttttcgataacttaggtaaaattttctctatccaatataaaggtagtgaagctcaagccaactttacaattgcacaagataaaatcagtaagaaagcaacaacattaactttaaatgtaggtgctgaaccagaaagtacaacagaagtaatgaagtatgagttaggtcaaggtgtttactctgagacaaatgtcttagttagtgcaatcaatagtttaccagattgggaggctaaattcttccctataggtgacaaaaacttacctactgatgctttagaggcagtagacaaagtagatgttaagacagaggctgtattcgtaggagctttagcaggagacattgctaaacagctagaatacaatgactatgtaactgtagctgtagatgctacaaaacctgtagaagactttgaattaacaaacttaacaggtggttctgacggaactgctcctgagtcttgggctaataaattcccattactagctaatgaaggtggttactacttagtaccattaacagataaacaggcagttcattctgaggctttagcttttgttaaagaccgtacagacaatggtgacccaatgcgtattatcgttggtggaggcactaatgaaacagtagaggaaagcattactcgtgcaacaaacctacgtgaccctagagcttctttagtaggcttctctggaactcgtaaaatggatgacggacggttgcttaaattaccgggttacatgatggcttcacaaattgcaggtattgcaagtggtttagaagttggtgaagcaatcactttcaaacacttcaacgtaacatctgtagaccgtgtatttgaaagtagccagttagacatgttaaacgaaagtggagtaatctctatcgagtttgtacgtaaccgtactttaactgcattccgtgtagtgcaagacgtaactacctacaatgacaaatctgacccagttaaaaatgaaatgtctgttggtgaagcaaacgacttcttagtttcagaattgaaaattgaactagataacaacttcatcggaactaaagtgattgacacaagcgcaagcttaatcaaaaactttatccaatcattcttagataacaaaaaacgtgctcgtgaaatccaagattacacaccggaagaagtacaagttgtcttagaaggtgacgtggcatcaatcagtatgaccgtaatgcctatccgtagcttgaataagattactgttcagttagtatacaaacaacaaatcttaacagcatagagcgtaggggcagttgcccctcctcttacataatgaataaaatataggagtgatatatacatggctagtgttggaaatcaaacagtccacacaggtaacacagtttacctaatgattggtaataaaattatcggtcgtgcgcaatctgcatcaggtgagcgccaatatggtacacaaggtatctatgaaatcggtagtattatgccacaagaacacgtatacttgaaatatgaaggtacaattactttagaacgtatgcgtatgaaaaaagaagacttagcaagtttaggaattacagcgttaggtgaagacatcttgcaacgtgatattattgacatcgtaatgatggacaatttaactaaagaaatcgtagtagcttatcgtggttgctctgcaatttcttactcagagtcattcacagctaacgaagttacatcagaatcaacccaattcacatacctaacctcagctaaagtaaaataacaataatgttaaccacccacattgtatgggtggttattttatgttataatatattcattgaataaaaaagcttaaggaggacgttattagtgaaatatccatatttagtagaattgtatgcaaaacatgtaattagagatgcagggtacatagaaaatgtaccaccagttatttatgaagatgttgtgaaacgtgttgaagaaataaaaagagaagaaaacttaacaatagattaattagtataagtttaaatagacctaattcagatatgggtctatttttttttgccactataaatacaaataactagatagtgtggtataataaagatagtgctatattaatttatgagtaaactaggaggaaataataatgacagaaaataatgaaaaggtatttacacctaccccaaatttatcacgtgagcaattaatagaaaagttgcaacgtggagaaaacttgacggatgaagaagtaaatattttgaaatattacaatgatgcagaagaacgtaaacagttagatagaattatcccgggtgttaatgatgtattttctaagcattacaacttaaaagaatatggtttagaatttgatattaaaataaaagcacctaatattatcgaaaacggtaaaattcaggcaagaagagaagcctatttagaaggcatgggaatggcagttagcaactttattttccaaagttaccaaatgttagcaactattcgagtatgtggggtagaggtaccagaagtattagctgatgatgaaaaaatttataatttatatgtattaggagtaatcgcaaaggactatggtgaatggctaaactcctttcgatactagagttaaagaactaggtggaataaaagccctcgttagaaataactatagtagaaatctatgggcaataatgaaaaaattcaaggtactaccgagtgaccctgcgtggcaaaatctcacaagtgaccaagtagagtggattttatataacatggaaagagacatagaagagcaagaacgactagctaaaggaatgcagttagaaagtgagttccaagactatgacgattcatggtatgataaaccacatgatgagttctctccaattcgtgaaggtgacgatgaggaagaaattgctcgtaaacttagtgaaatcacaagtgaggaagacatggctaaacttaaagctcgttgggaggcaagccaagaagttgatgctatccgtgcagaaggtggaacaacaattgaagaagatacgattaacgaacttattgctaacaatgttaaaaaagcaatggaagaggctagacgtattgagaaacatggtggaaacaaatggcaagagaaatcatcaattgagttagaagaggaacgtaagaacctagagtttaactcacagttgaaacaaggagatattcaggaggctatcgatttgtttaacaaagatgtcgagccaacatcattagatgacgaatttcaaatttaagggtagggtattccctgccctttacttgtaaaggaagtgtggaaatgagcaacaattatcgtttttatgttgaggcaatgactggggatgctgttgcaaaacttaatgaaatagacaagttaatggataaaattgattcaaagagtgcaaagggcacccagaattttttccatacaagtcagaaagacattgataaagctgttgaggaaatgcaaaagcttatcaaggcaaaaaaagaactagatagagcttttgacaatcagaagataaatgcagaaagcatgggagatatgacagcatataaacgtgctgtatcggatgcagaagaactaactagaagatttaacaagacacaaaaagaatttcaaaatcatgctagaatgcaagctaaccctaactacataaatgctagtacattaaggcaacaaaaagcatttcgtgatgaactaacagagcaagagagagcaataagaaatatctctagggcacaacaggagctaaacagggtgaactctagggttaaccaccgtgcaaaccaagcaagtgcaacaggaagaatgacttacaatcagtcagagagtatgaagcgtgaccttagacgtactggtgtatttgaaagcctaggcgcagaaaataaaagcagacagcaagagctacgagaacgatataaacagagacaagaagaactagcagagactagaagtaatacaaatttagatagacaagttcgtaagaatagggaaactagtattcaggctgagataaaagaaattgagaaagaaattgaagctagaaaacgcctagcagactctattaaagagactgtagagaacttaaaatctaaggaagcttcactaaatgcatctgatataaaagtagatgctgatagaaagagtattcgtggtgttctagctgagcgtgcgccttctatatcaatggctatgctaggaggtaccgccgccgccataggtggtttatacgcaaaaggagcaactgctaacgcaggtatgcgtgatgcatctatttctttaggacaacgtacaggtactagtgatttccgtgcactaagaaaaagtatgcaagagatgggtattgagaaacagttaggctataaaggcgctgacatgttacaattccaagaagatgcattaagtaatattgggtttacaagtaaagaggacttagcaggaagtacaagagccttagcagagggttcaagagcagttccagtagataatgagactttaagtgactttatgaatagtcaaatgaagagtggagctattagtggtagagaccaaattaagaatattcaagaaggtttcttgggtgctattcagcgctcagggatggcaggtcgtgagaaagaacaactagaagctcttaaaacattaagtgagcaaagctttactggtcgtaacggaagtaatcaagagcttaaagaacaaatggcaatgttaacaatgctaaaccaaacaggtaagcgtgctgtccaaggtgaacaaggagcacaactaatgtcaagtttatctgcaggtattcaaggtagcgtatggaataataaggcatctttacttttaggtaaagggacacaattccaaggactagcaggaatgtacgacttaaaagctatgcaagaacaaggagcaacgccagagaacttacagaaaattattggcagtgtccaacaatcagttcccggtgacgaaaagtctcagaagtatgctttcggtagtgctttacacgaactattcggtacagatgctaagaatgaccaaatagatgcaatttgggaggcttatgccaacggtggtttaagtcaggataacgtagacagaataatgaatgaaagccaatctacaggaaaaggcaaatacgacaagaacatagaagactatgcaaactctaaagaaggaaccgctaaccgttcagaagctgttacagagaaacaagcttcacagattaacgatatgggggacatcttaagagaaactaactctaaattaggagcacttcctcctgcgttatatgcgttaggagcaggcttaggagctatggctgtttcactagccacatcaggctctattggtggtttatctagtttaatcaaaaaaggaactcgttctacttttagtacaggtggaggagtaactgcagggggcggatttttaaaatcagctaaagaagcattctctgcaggtaaaggctctggcggatggttccaaggtattaaaaatgtaggtagtgtagctaaggactccgcaatgggtgtcggagctaaggctgttgaaggagcaaaaggactaaaaggtgccggaatgggcagtaaggttcttggtggcttaggaaaagcaggtaaattcctaggcaaagttgcaacccctctagcgataggttcctctctactagatattgcaaccgcagatgataaaacaaaggcggtaggggagagtgttggagctattggtggaggtatcggaggagctaagttaggggcaatgattggtacatttattgcacccggtcttggtacaggtatcggaggagctattggtggaggtatcggcgccataggaggtactctagcaggttctaaactaggcggtaaatttgttgatggtgttcgtaaattcttcggaggagaagaagcttatgcggaagaagcagacttaactgcagggcaagatgttgcttctgggcaagagagtaaatcaggagtacaagaagccagagacacggctaacaaacgagtcctatctgagaaaacacgtgcagagaataacgcagaagagtccgccaatctctctatctattctaagttattagatagagcccaacgtatactaaaccaagcaaaaaatcaaaacggtatattcggtaactcagggagctctaaagattcttctgatggaatgggttcagatgcttctagtaaagactttggaggagactgggagaaagccattaggcaagcatctaagaaaatgggagtagatgtttctgacgatgaaatagatacaatacttagattgattcaggcggagtctagtggtgacgagagtgctgttcaacagataattgatgagaacaacttcaatggcaatggcggagctaaaggtttgctacagtatgtccaaagtacttttgatgcatacaaagtagacggtcatgacaacataatgagcgggtatgaccaattgctagctttctttaataatagtaattggaaaaatgacctaaattcttgggatagccgttatcaaaacggtagtacaggatggggtcctactggtaataaaactagagcgatgggtggacacataactagcccagagtatgcgctactgggagaggtagcaggtcaagatgagtatgttataaatcctagtcagccaacagctccacgtttattagcagaagctactagaaaaacagcccaaaacttccgattaacaggtaacggttctggtcatgattggggagcttcaatttctaaaataaatgcaacaggaggagctcaatcaggttcagctcctacgatgacaaatacaaatgaggtatcagttaatgtcaccatacaaggtgggggaacaagtgatagtatagctagagaaattggtgataagtcagcaggaattatcagcaaaacactcgatgccaccttcacagatttcttcgcaaaagaatacaggagagtgtagaggcttaatgtctctacttttatctaaggaggtttataatgtcagtagagttaagatacccgagatttgatttaactttttttacagagacagacaactaccatatagtttatgatgcaaaagatgggcttactggacgtaataacaataacggtgaaacagagaaggtaagcaataattttatggcagagtctgtaattagtttaactacaaaaaatgctttagaagatgatagtgcagtcttctccttcgtattagcaggggatgtgtattgggatagagtgctaaatgctaatgatgcagttattcttaaaatagacccagatacttcctccactaaaaaatcagataaccctgtactactagttggcttaatatctgaggtcagactagagggtgactatggagagaactctaagatgtacaggataacaggacagtcttttgcaaaggcattaatgcagttcgacttaggtgttattcaggaagtaagtgtagttttgacagacttaggttggttacctgacgatgcacaagaaggtataaaaatgtctggtagtagtgcaagtcaaatagcagaaagcctaatgaaaagatttttacaatatatgaaatttaattttaatggtcaaggtatagataagttcttagaatgggaactagatagttggacagaggcggagagactaatagatagtaccccttacataaactatgaaggttctttaaaacaacttatagacgatgtaaccgctaaaccgtttaacgaattgtatttcgatgcaacaccagaggggaaatgcagaatgattatgcgtagaaccccatttgataaatctgattgggaaaaattacaaacctacacagtaacatctgcagaagtaatatccgaatctgtagcagttaacgatacagaagcttactctatatttaacatatctattaacaatttgtatgggactgactctatgatgttaggttctaaaccacaagtattccctgatttagtttctaaatatggttataagaaactagaagtacctaataggtatttagaaggggcaattatagataagagtaacagtggagataaagctaacacaaaacccgaaagtgataatgatagtaaagagagcgatggctcaacagctaaacagatgtttgacagagagtacgctcttgtcttaaactatctaaaagggtaccctgttgatgtactaagagttaaaaaaagtaatgtaagaacatcaataacacaagtagatagacgtataacagataacgaagcagataaaattatagaccactatattacaaatcaggcattaagtaaggaagatttttctaaatttacaggaataaccgaggagaatatagaagagggtaacggtaaggtagagcctacatataccgcagttagggatttccttaatgggttagataaaaacctaggagtatctagcataaaagagaaattaatgaactacttcaatttgatacctaaccaagccacgtctattgctagtgaatacaaagcgcaaggtaacttaggtaaactaaaatatgaagaaataatggagaataacccaagtgatagttcaaccgtcactggttcagacaaacgatttgtttctgagtttactaaaagactagcaaattggtactgtgaaaacgctaatttctacagtggggacattgtagttaaaggtgaccctaaatatagattaggtaaccgtttgtttgttcaagatgaacaaaatggtgagttgtgggagtattatatagaatcagtagaacattcgttctcttatacacaaggatacattaccactcttggagtcactagaggtttacaaaacggaggaaatgatagattcactcatttatggggtaaatctgaggacttctccggaggtatgttaggtgagaaaaccttacaagcactactagatgaacaagcagaggcaaacagtaaaaatgatggaggctctgatagtgggagtagctcaggtaaagagtacacagcaggtgcaggaactcagctagcggtattcccattagacgtaattaatgtaactcagggagaaaatggtggatacagccacatgggagcacttgcaatagacttttcagatggtactcctcataaaccttactatgcaccatttgactgtgaatgtgtgtacactgactcttactcaggggttgcatggcaatctcaaaagcctgttaaatgtgtagatggtagcgttacttacgtaacactattatgtgtacacgacaacaactgggcaagcaacaaagtaggggataagaaagctaaaggggaagtgatagggcactcaggaactgcaggacaagcatcaggagaccatgcccacttcgaggtgtctaaaggtaaatggcaaggttggagcacaagcagtgcgggagtttactttataaaaaacccttctcatttatacgatgtattttctataaaaaataatgtaactggaaaaacaactaaaattatgaatggtggagggtacaattggcgtagtatagactgggacgataaatctggctcaggttctggaaagaaaaagacagttggtgctagagccatggctactccattcggattacgtatgatgcgtagcgctcctgtagaaccagaagaaccaaaagttgttaaacaagtagaaactaaaacagttgttgaaaagaaaccaaaagtagaagttaaaaagctcccaatactttatgggaataacattgccacagaagcaactaaatggggaagagctcactcgaaaacagagtccacattccaatctgccttcaattttggagctaatacagataaagacccatttgaggaagacattatagcaacagacagtgcaggatttgtttggtggtgtttctaccatgcgggcatatcactatctggtggggctagaatggttactactcgttcactactttatgataatcaattacaaactatctctactagaggtcagaagtctttagagctatttgataagatgaaggtaggagatttagtttggtttaacagagctagtcatgtagggatatattgtggtgagggcaagatggtctcttgtaatggaaaaggtaacatggatgagtccccaaaaacaggtattgttattgtcgacatgtctaaaggttattggtggagcgcttttgacggaaatgtacgtagatataaataaccctattttttagggttatttttttttgtataggtagtttttagttattgtgctataatagataatgaggacacatgatgagaggatgaataaattggtaaaacgcagatttcaagcaggtctaggctcagaaattaaaagagtatataaagaaggacaacaaattaatacgctactattagcacaagtaattcaagtaaactataaatataatacagtagacttgctagctttacagcacaaagaagtatttcaaaattcttatgcaaatgagggtcgtttctctgcaagacttcctatggaatttggcggtagaaatatcgttggacagccttatggacaggttaacccgatagcagtaggaacagtagtattagttggttttattaattccgataaagacatgcctattgtaattagtgtttataataataacgatgtaagcaaacagctttcaagaacacaattttcaaattcagaccctaaagatttagagttaattggggatatgcaccaaaaatttagtttgtacccttcattgacatatgatagcgttgatggagaaggaggacgtgtcgttactttttctggtaaatcatttattgcttttgatacaaaagaagtagctaactcctctacaactgatgcaggttatggtactaagtatgaggacttagagacatcatactataataatggtgacctaatagagcctatgaaaggtagagcaccaaatgtactgtttaagcatcaaggggtgcttgatgatgatggcaaaccagatttgcacgatttactaattcatattaacccagatggtacttatagaacttctatgatgaacaaagaagaggattggcgcacactatttgaaatgacaccagatggcagagttaaattaagaaaacaagactctattaatattgatggtggtatagaaataagtgagctaggaatcaacaatgaggggttcgtttatttacgtaatggggatatggatttagaagtacgaaaagacggtatctattcacaagggaaactgtttacagccgatgtagacctatccgatgtatatgacaaactaaatgggttgtctatacagattaaggaaacaaatggtcaattagagattatagctaatggtgtagaagaacaaaatggaaaaatatcagaactttctacagaaataacaattgtagcaggtaaagttgaatcaaaagtaacaaagacagaagttcaggatatgattgacagttcttttgtagatatgtctgatgcgattaaaaaagcacaagaagatgctgacaaagcaaataaagtgattgcagatatgtctagtgataacaggttgactccaagtgaaaaaatagatttattaaaagaatgggatattataaaaaatgaatatccaagctatcttgaacaagcagagacctacgaggttgacagtaaagactacactgctaagtacaattcattagagctatttgttacccctatattggctgacatggaatcaactagctcagtagatggagcaacacttcgcaaaacgtttaattcttactatacagcaagaatagctttactaaactctattagtaaaaaactaaaagacggtatcacagaggctatgaaaaaagcatcccaagcatcactagatgcaacacaagcaatggcagatgcctcacaagctaagattgatgcagataatgctaacaaacttatatctgatatagcaagtgataataagctgacaccttctgaaaaataccaacttaaaaaggaatgggatgtaattgttaaggaataccctacaacaattgcacaagcagagaagtacgcagtagacacagcagagtatacagctaaatacaaagccctagagctgtttgtagagcctttgtttaaagacatggatgaaactagtatagtagatggagaacgccttagagcgacattctcggactattacgcaagtaagattgctttactaaaagaagtaacggactcagctaaaacagagctagatgcctatggtaataaaatatctgtaatggaaacaaacattactcaaacgtcagaagctattactttactagctactagagtacaaactgtagaagatggtgtacaatcaaataaggcacaaatcgaaatacaagctgaacaaattagtcaaaaagtaactgctagtgaggttaaaggaattgtagacgattctattaacaatctaacattaggtggaactaacttatttgttataaagacacagacagcaggtttgctaaacgagaatgatggaactgtaggtactgcagtagacaactcagtagtgtcagactacattaaagttaatcaaaaaacaccatatattgctacactttacggtaacactggcacaaacatgattataacagactggtacgataaaaatagaacatttatttctggggaagctgtggcagactctggggattttagtaaaaagtatgtgtcacctgagaatgcagtctatgctagagtaagttataagaaagcaaactctgtgaatatcaaattcgaggcaggtacaaaggctactgattacagcccttcatgggaagacataaaaggtgaccaaactgctttagaggaatacattaaaaaagtagaagaacaagccaagaaagctcaacaagatgctgaaaatgctaaaaatgatgctgaaaatgcaaataacgcaatagctgacatgtcgaatgacaatatgttagcaccgaatgagaaaaaacaaatactcttacaatgggaacagattaaaacagagtatccaataaacttagaccaagcaactaaatttggggtgtcttctcaacagtatacaacagcatataacgcactagacgagtacttaaaaccaatactagctgacatgacaacaacttctgtagtagttggttctactttaagaaatacgtttaacaattactatgacaaaagaactactttactaaacagaatatctgacgtagcaaaaaatgtagcagacaaggcacaagaaactgcagatactatcaatgataatttacaaaatattggtgggtacaactatgtagggttctcttccggagacaatatgttgcctagactgatgattaaaaacgttggttactacacattaggttcgtcaaccacagagttcattgacagcatggtagctgtaaaaggtgatgcaacgacccaacctttcgattatactgtaggtacttctgataaagaaattgctggtggcggtttagctgattaccgtatgaaagaagtaaaagaaggtcagtggctaacagcttctgcgaatgtgcaggtaataggtggtggctccgctagattagctatctacactttagaaggggataactgggtaggctctaacagtacacctatacaagtaagtgatggtttgaaacgtgttgtggctcaaagaaaagtaacaggcttaacaaaaggtgtgttaatacgtattgagtcagccgacactaatgttaaagagtttcgatttggtaatgttcaactagaagtgggtatcatcccaactccttggaaaaagtctgatatagatattcaagaggacataaacaatgttgttcagaatatcaaaacatacactgcttgggctaacgatttacagggtcttgattttacaagagaaaaggttgaaggaaaaacttacatgtatgtaggtacctctatgaaagatagtgataactattcagattatacatggaggttaactgatgagcatatagaaggtcagattaatggtaaggaaggcgcatggatttattctccaacagcccctactaacccatcgcaagggcttatatgggtagacttgtcaaaagtacctaatcaacctaagcgttgggtagactcagaaactgggtgggttgcgttaacaccagaagaggttaaagatttaccttggggtgaagatggcacaaacctagctgactgggtagcacaggcagagcagagaatatcttctgatagcattataaatactgtactaggttctgaggattttactagtgtgttcgatacaaaagctaacactactgacctagacaacttagctacctatgaagatttagactcaataaaagaggactataaccgactaatcaaagaaggtataaacggtattgattttaccccttatgtaactaactccgaactacaacagcttaaagacagctttaacttctctgttcaacaagccggaggagttaacatgcttaaaaactctttaggattctctgggttagacttctgggatggtacagtagggaagaacttattacctaactctacttggaatttaggtttcggtagatggggtggcgcttcaatcgctagttttgaaatattaccaccagaagatgacaagcctacaagtcatatactgggttcaataggttctcgttcttctactaaagaaataggtaatagaccccacccattaaaagttaactctggtgaaacgtatacaataagctttgattataaagaagaggcattggcttatgataaggacagacctatccttgttgttagaaactaccctgataaggacacagaccaatggatggagtactcaatagaaggttgggcagtaatggctaacggaagcactactgacttaactgtttggagacgttttacaaaaacatttacaataggtactagtggctacttagatattttacctaaaactatagtagagtcatggacacacaggtctttttggagagagctaaaaatagaggaagggtcacaagctactacttgggtacctaacaaggaagacggggcgtttaccggtggtattgttgaaactacccaaacagaagaactagctaacctcgggttcggttcgggatttgttagttctaaaagacctagctcttcattaacacaatctgtagaactacctgaaataggtgctaaccttgagtattcactatctttttatatgaaggtaactacagacaatcctgtagccgactttaaatgtggtattcgggtttatgagggagatactctaacttatacattaggcatagaagatgcaacacagccaataccactagggttccaacaatacaagcttgtgttcactcccacaagtacctctactaaaatagaaatgtttgtagagaatggacaagaggcatctgttattatatcaggtattatgtataatatcgggaatatacctcttaaatggcaaccatatccaagtgagatatacaatacgaatgttaagattgatattaatggggtaactgttaaaaacaatcaaacagatgggtacacaatgattaccccccaagagttctcaggatattctcgtattgatggtaacatagaacgtattttcactttaaatgggcaggtaacagaagttaaaatgctaaaggctgaaaaacgtataactatggaaccagtatctgtgtttgctatgaatacagtaacagatacaaaaagaattagaggttgggcatttgtaccatcatttgaataaataattcaactttttaaccgaaaacttcacttacaagtcgttttcggttaatttgtgttatactatatagagaaggacacgaaaggacgatgagactatatggctttaaacggaacaaagtatacagcctttgcccgacatagattagttttagagtggcgtgcaaatcaaaacattgcagggaactactcaacaatcagcgtatggctatacctacaatctatggataaatggggtagacttgatgctcccgctatcggtgatgccaaagttaccgtagaagggactacacagacagaaaaagcttcctctatgttaaatgctttccaaaagaaactattactagctaaagagtggagagttaaccataataatgatggttctaaaagaataactattgggggtagttactttgtaaacgttacttttactgataacggtgtatcaacatattatggtacgataactatacctaatttttcagtagacctaaatagaatacctagaagaagttcgttaaaccctgtccctacattaaatttaccggggaacttaccaataacaataaataggcagagctccacattcaaacataatctaactgcttgggtagctaacagagataaccccacattaaacaatgatgcccattggacgtacttgacaaaccttaatgatgtgggcactagtggagcgtttagttttacagtagcaaataacaaaactatttttactgcattaaacaatagaactagttggcaaggaaaggttaaactctggactatagggttagatgatgtagttagtcaggaaagaacatacaagattgtccccccaatgaatgcacaagcatcgggaggtaagataaccttaaatgtgggagagaaaatcaatgtatcactaagtaactatcggtctgatgcaaactttacttatgatggggtatttaacattagtgggctcaacatacctattgccacaaattcagcagggaacacaatgtcgtatacattaactcaaacagatgtagacaatatattgaagaaaataccaaatgcggattcctcgtggggtcaagtaactgtaacaagtaaatatagtggagtacaatacaggactccatggacagggcagagaatagatataactatacctaaaaacaagtatgtaccaagtattaatggtacccctacttatgaagacacaagtagtgtctctgtcgggcttacaggtaacaatcaggtagctcttcaaggtaagtctaatatcaaagtgactatccctgctaactttgcaacggctaatggttactctactttgaaaacaattgatgtgtctttaggtggtacatcaaaaacaatcaactattcaaatgcagaaacagttgtagaattaggggcacctgctaaccatacgtcagatacattaatagtcacagtaactgacagtcgtgggtttaagtctaactggacaaaacatgtagatatttatccctatgaaaatccaaatatggactttacagtcgcacgtagaaataactttgagacaactacagatattaatgtcaatagtacatggtctcctatcactataggtggtgtaaacaaaaatgctgtccaatcagtaacctacgcaacaaaagtagcaggtgttggtacttatggagcagaaactgctttaaattttacagctaatggtagtatggtaacagtaaaaaatacaccaatagaattagataataccaatatatacgaagttaggttgagtgtaactgataagtttagtacgtttactagaacagctactgttaaaccgggtaaccctatcatgtttattgatgccgataatcgaagtctgtttttaggtaatgcctttgttgacaataacaataatgagctaagaggcttattagagatagaaagagataagtggcaggagaatggtttagtaggaatatccttaaacaacagtgatatatcagcagtcaatggcatatggttctcgacagatacatcaaataacggaggtgagggagttcactttattaaatcaggtaaaccaagaaactccttaaagtgggaggactatgactacttttatatgagggacaatggattctatgttaacaatgactctaaccctatatttactgtaactgatggtggggatttaaggttccctaaactggataacttatgggatgggaaggcttacatgcacaaagaccagataatagtaccacgtaaaaaacttagtgaatgtagaaatgggtgggctttaacgttcagttcttataataaaagtacaggtgagctatccttatgggatataattacattctttattcacaagaccgcaccagactctcctttaagtggtacaggtcacaggttcttcttaccagatggtagggatgctatatctcaaaagacaaaatatatatacgtcaatgactatcagttaaggggtcacgaagaaaatgatgacaaaggtggaacagctactacaaataacagaaataaagttcttatgagggtggatgaatggtaaatatgagaacaatatacgtagaagtagataatgaaggttacgtagaaggttggggtagtaacctgtctggtaatagtaacattcacagcgtaacaatagaggataatgaccagtttttttataaaaactccttaaattttaagtattcaaatggctctctagtattcgatgaagataaggcactacacagcgctaaactagccaaaaaagatgaaatgttaactgcatgtaactatgaaaaaaatctacctttggtttttagggtaggtaatgaggattactttgctcaaccattaactgcagaagggcttagcgaagtggtagcacctctactagtaggtttggtagagaccgttcctcttgaattagttagagtaagcgatgatgcacaagtaaccttacaagttaaccacagcgtaattaaaaatttatacgactatacaaacctaatacatgaatacttaaacaaaaaattagaagtagacatgtttaagctgatagatgaggctaatacttttgaagaagttgagggagtattatggaaacctacaactagtgatgagttacctagccaacctaaaatggaagaccttcctacaaataacaaccaagaaatcgtagataagctaaaacaggaaaacaaagagctaaaacaaagagtagaatttaacgaactagctctgatggatgcgataaatatgttctcggaaatgaatagctaggctatattaagttatgagaggaggtgacaactacatgtacccatatctatcaatgttatacgcatcttacgtaattaaagacccagagaattaccctatggagaaagttccggctttaattagagaagacgtggagaaaatcgtagaagagatggcaaaaaagaaagaaaagtaaagctcgttaatttaggtattggtttagttttaggttttacattaggattcatattttaaaatagaagggtgtttttgttaaatgacagagtatgtatatattgatgtagaggtaaacttggaaggcaaactagggggacaatggagtacaacacatgaaggagctacccctagtataggtgatattgtaataaaagtggaagcaggctctcctgcatcccacggagacttttctggctaccgatacatcgatggtgagctaaccttctcggaagagttgttcaaagaggatacacgagaaagtgaaatagcttcacaggttagttggtttaagcatgagatggaagattttcacataccttttaaagtagctgatggtgagattgaggggactattaacagttccgtcaatcctgacaaagccctgaatgactactttttaggttatagttcgactagcagtacctactacaacaattttgaaaacaactcaaacacaccaaccaaggtaacagaagtaactattgaagaacagttccatttaaaagcttacattcgagctgtaaacaatcattggttggacaagatagataataaactgattcccctaatggagtctaaagagactgtagaagaaattagggaggtaaaatgggatgacatcccagatgaaccattaccagaccaagactccgttgaaccagataaacctacagaaacgcctttacttaaagaattaagagagataaaagagcgcttaacaaaattagaagaacctaaagactaacaaaacaaaataggagagggtagttagtgctaccctctttttttatactatattgtactatattaaggaacgaaaggagcggttactatgggacaatcagatggtatgggcggtacattaaaacgtattgcgattcaagtaggtaacgacccgaataaaggttggtatcgatttcaagtaaacccaactcaatataaatataataagccacatcgtgttactatatttaaaactaaatcaaacattataacagaagactttggtaaagatatagaaactatccaattttctggtacaacaggattcagggtagacagcagaggtaaaaatggggcggacagactaaaagaattagaagaaataatagataattacgcaaaacagggtggtaatggtaataggtctagtgtagagatgaaattttataatttcacagacgataaatattttgttgttcatttagcgccagaaggactatccattgaacgttctgcagaacagccattattatttaattacaccttaagtttagtcgtgttaagagaggcaggacagccctctgagagagctcaagtaagccctcaaataggtaatgtaagtcctagcattggacggacatacaatgcacaacaggacactagaacacctgctcaaatacttcatgatgaatataggagaagtgttatgccaaatacagcagtaaatcctgcagtaacatcaggagcctataactatggtgtaaatgagttaaaaaaaataatcggatatggagggtagctcatggaaaaagtagaacaatccgcagatttgctaagattttttagatatttaaatgtcgatattagcggtgaagttgtagccaatgttattgacgaccaaccaaactttatatcaaggttctacacccctcatacacgagtcaataaaatatctagtacactattagatattgttagagataacgatataggggaaacaaataaggctttgtctaaagactccttaacctacaaatttttaaaaagtgggcttaagctttcatctccacgtatttacgaactagcacaaattgtagtattagaatcctttgctcttatatatgctatcgaagaagaaccagagatgtttaaaatgattaacgaatcagatgtaaagcagactagagaaaatgttaaatacttaattgactgtttagggggagcaaaagactatacagacatagtgatggacttacaatctatggatgtcgctctaggatatattcaggagcaaattcctttaatacaaggaggtttaccagtaaatggcacgatataaaaagcatttaattgtatatggagatacaatgcaatccatagcacaaaaagaaacaggctctgtagataattgggtaaaaattgcggagtacaacgacttagtttacccttacatagtagatactatgcaagaaaaaatgagcaacttagaacatctagctacacttggagacaccctttttatacctgatgaaggtaacttattggacattaacacaagctcattaaaccaaagagatatggatttcttattaggcttagctttaggtaaagatttggatatgacaagtgatacagattactatgagaatcatggaacaagtgatgaagtgtttgcaataacacataatgggcatggtgacttgaagatagctagtggggcagacaatattaagcaagccactatatcaagattgatgacagctaagggttctcttatgttgcacccagagtatggtagtgacttgcacttaatgttcggtaaaacaacaattgaacaaatgaagataattagtatagaagtatgcgatacagtacttaaagatacacgagtagcagaatgcgttctagtgaaccattatattgaagaagaccgatatgttggtaactatagagcaaccttacagtctactagagagcaatttgagtttgttgttcaaaacgataactcaggggctctaattattgtatagaaaggataaggtttaatgagactaaagaaaatttcagagatactaggtagactaattgatgtaactatgataaacacacatgagataaacgatttttcagttggttctactattcgttctatttatgaagctgtttctatggagttagaacagtactatattttaggtagagagaatattttatggggaattgaacaaggagtcctaaatgcttttgactttaggaaaagagaagcaaaaagagcgtatggtatggtaacactagagttccatacggttactcagacccctgtgtatgtgccaacaggaacaacattcgactctagcttgtctggtgcccctagcacgttaacattccaaacgatgcaagactacataattccagaaggtgttataacagcaaaggtagaagtttattgtacaactgtaggtacaaaagggaacatacctaaaggaagaatcaatcgggtaattaacaatatatcaaacttaaaaaccgtgtataatgagtttgattttttaacaggtactgatgaggaaagtatagaatccgttaaaaaaagatttcatgcatttgtggaatcacgtggtagagcaacgataaaagccttagattacggtacacgtcaagtagaggaagttgcaggagtttatatcaaagaagaagtaggctacgttagaatatatgcacatgacttaaacggtgatttaaaacaagaaacactagataaaataaaagtagctattgaggactacagacctgcaggcattaaactggatgtattccctgtaataaaatccaatgtacaagtgagtgcaactgttactataagtgacaaatcgagaataaatagtaaattagaagaaagagtggagcttacaataagaaactacttaaatagtcaagttgtttcacaaccattaatcttagctgacctaattcaggttataatgaatattgacgatgttttaatctatgactgtaaaattaacaacatggaagggaacatggctgttagggacgaagagataattcgtgcaggagaggttattgtagaactgatataaattaggaggaatataatgtgagtaacttttataaaaatatccaccctctgttgagacgtggtaagaaacctaacaagtatgatgataccaactttgcagtgcttaatgcgttgaactatgaattaactcaggcagagcaggagaccattgctagtaagattcattcttcattagaaacagctacaggtgagtacctagatacttggggggactggtttggtgtatatcgtaaagatgattggaatgacgaatattatagaaaaagaattataagagaacttttactaaaaagagccacaattcctgctatcattgatgcgttattggatttccttaacgacaatgatgcagtcatccaaatatatgaaccttggagaaacattttctatacaaataagtcaaaattaaacggtgacgaccatttaatgggttactactaccgttttgcaattatcgatatttcaattgatagaccgtttcctcctgaaattgtagagattattaaggctttcaaacctgcgggagttctattttatctaaggctagacacaagcttaaataagaataaaacaactgtagaaagcccatatgtatacctagacgtgacgaataagacagaattagagttccttaacggtttatactatgacctacgaggtaacattaacctgtctgaccaacgtacacaagtagtagagagtaatatcttccatacgaataactctatgctaaacggggaagatgtgcttgcaggggcatttgaccacggaagaggttacatccacttagcaagtacgacattgcttgagtacacaccaaaacctactgactctatgagtgacttaaaaacagctctaggagagtcaggtgctgacatgtataatcaaacaaaagaaaaggatggaagaacagcttctattcaagtacctgcaacaaagaatatccacactttatattcaaacagtacagactttagtgattacgattactcgggaaaccctaacgtgattgtaacaaatgctaatacgttcaaatcaggaactggcggaactcttacctataacagcggggagtacactgttttgatggatgggtcagatagattaaataaatttaataccgatggggaaaatagtgtatacctagaagataaagcgacctatacaatttcttgtgagatgtatatcggttctgactatactgggaatgccgaccaagtatttgctaactatgcatatcttgatggaggttacactttactgcaaacaacaagacttcctgcggatgctcctagggatacttggataacagtaaaaggaacgtctaccatgaattaccaagggagggcacctaaagtattatacttgagttggcaaacagttgcaagtgatactaacccaaccggtacgcttaagatgagaaatataaaaattgaacgtggggaaactaatactccgtatcaacctaatttattaggggcaccttggtatttaggtaaatttccattaggaaaaaaccttgcagaccctacagttaagttcccaataaacacgagtgaatataagctatatcaaggtgatatgtcagagccgtttagagttggggaaacgtatacagttactattgaaggtataaaacctactaaaaataaatttggtgtgtataatgcaggcacagttttattaggatttttacatcctgtagagggtttacctaatacatggactgggacatttaaagtacctgcagtaaacgcagaataccctactatatcaattatcaaacg

SEQ ID NO: 5 - DNA, 149666 bp, Unknown
  Description of Unknown: VREML85-2 complete genome sequence
cgaaacactacccgcaaaagttgccgttgaaaacatgcatctaagagagttagaaggggaaatccgttctgatgttgatggcgtggcatctttcttatctaaattaggtttcaaaaactttgattttgttttaaaaccagtaaacgggggtttttgtttattcagtaaaaaaggcggggaaagacaagaaacttatctagacgaacaaggagaaaccgccgttataaatgaatttaatcgggtacaggcataacaaagagagagagggggaaacctctctttctaaaaaaaagaaaactaaaaagaatataaggagaaaacagacatggaaacagtaaaagacattaaaagaatgataagaacactaaaagacgatatagagtataaagaaagctatataaaggaattagacgaacaaggaagaatgatagagtcagaactattgaaagcagaagtaaaaggaatgagggacgttatacgggacatagaacaagctatatactagagagagggaaagactagtaaagaactaaaaggagtaaagaactaaaaaacaaaaaaagaccttagagcaaaaggaacaaaaaaagaaaaagaccaaagagcctgagattttcaaaacccgagcttttcggaacccgcttatataggcgcacactgtttttctatcattctagcacaaacaggaagctagagggcgcacaatagccctaggaagccacaggaagcccttagagcggttttacatagatttatatataattatccataaataaatagaactattctagaatgctttaaaatagcttaaaataaattgaaatatttaagagtttatacttgcatttcatctctttacatggtatagtatagatagttaaaagagagcttcattattcggacgggaaacaaaataaaaaaagttgagtttaatgcttgacaagataaaatatacatggtaatatagaggtgtggttagggttaaaccttacaggaaaacgagcacgaccacacaaacaaaaaaatttaaacaaatctattgacaataaacaataactattgtatacttaacttgtaagataaataagagggggaacttaaaaatgacaaacacgacaaagaaaccaaaatatttagtggtagataactacgatttagacatgtacgaactaggacgggttaacactatgcgagaagtgaaaaagctttgcaaggagcaagtagaagctacagacggggaatgctatgttatggtgttaacactgaacgaggaaacaaacaaatattctagaaaatcggcggaaatcgtacactactaatctattattgttatctaatctagaaaccaaggcacaaggcaaaaaacaggaatgctattgtgtcaaggtttctaaggttagagggtaagaaattgcctagggcagaatttcatagttaaaaatttaatcgtgttattttaaacttatctattgacaaaacacaataaacaagctataataaaggtgtaaggtaaagagagggaggaacttaacaatgaaagcaatcatcattagacaaatcaaggacggttacaaaggcattctagcacgtaaggaaaacggttggacaaaggaggaactaatcaattttacagcaggcgtaagcaatacactatttgaccttatcaatgatttacagggcgggggctttattacagacaaggaagcggaggaaatagaggaggtattttctaacactatcgacacactagaattttagactaatctattgacaataaacaataaaaataatataatattagtgaggggggcttttccctctcactcacacaagaaagggactgactaaaatggaaaatgtaaaaattgcaatgaaagctatccaagaagaaataaacgaaactactctaattataacggcatataagagaccgccacagtggtttattgaccatctagaccgattacagaaagcacacctttcactacaagacgtagcaagacaaatgccagaaattacagaaagcggggctaactaataatgactattgaacaagttataaaacagttgcaagaactaccagaagaagaaaaagctttacagttatatgtatgtgacaacatgggcaataactactctatagaatctatttcagtgtatgacagtgaaacaaaacatgggaaaacaaatccattaggaataaactataatatatgacggcgtataaagcccgtagcgaggttttaacgggctttatatataaacaccttaaggagggcttacaagtgcttacagtggaaaataagggcgttaggtggctagtgagtaaagaagcatggcgggcgggctttgctatggaggtgctaggcttgccagattgtaagattagaacagtattaaaagcgggctataaaattattatctaattatttaatcttttttattgacattaagcaataactttggtattctatacatgtaagataaataagagaaagagggaactaaaaatggaaactaacaaagcatataaaagattattgaaacaggttgaaagattacaaagcgatttaatggatattcaagactattcggaggatgtttaccaagcttttgaaagattaattgaagaactggaagaggtaaccgaagaggactagaccggcactataggactataccagttaaccccaccccgtggttttgtgaccgtattcgaggtgggggctatttgggcaccctcgaccctcgggtacctattttttggactggaaattttttctagaaatttggaaagtcaacactaaaagtcaacaccttataactaaccccaccccattgtttcctctagtctacttatctaataaaagaccccaccccgttgatgaggatagggtcttttttatataaccgtctatcttaaaataagtcgtatctgtttgcttgtctaaaactagctatttgcagaatgaatgtagcaattagcaatagtattccaattgcacatagtataatagtaagccaaggtgtaggtctacttgcttcatttgttaattcccagtatacaccataacctagcgcataggaagcaaataagataatagctccctcgattgttagtaaaacgtagattaagtacttcatttattcttcctccactataaatcttgctttagcctttaatggtgcgtagtccttttccgttaatcgtacataagcaacacccggcactcccggagagcacacgtaagcaactacaccccagtctttgacttcacttactgtggcaaaacatcccccaaatgtttcatcgaaatgcgggactatttgaacaacatcatataactctgtgtgatacttcatttaatcttcctccgtacttaatgggtcttgtagatagaagtcggagattccccatttgtttatataagtaatttctccttctttactacctgtcacctgtcttaacttgtatgtgatttcttccccgtcttcacgagagttcccgtctttgtctattacgaacaatggagtcttctctgtgtctaatagttcgtaacgctcacctgttaacttgtgtatataaatcatgttatccctcctttagaacaatgcacatatagatacaatcaccatagttttcactgtcatatgtgatatagtctacttcatagtctagtaattgttctgggaaatcttttgagtgaaactccgtacgccatgactgttctgcgcaatagggttccccgtcaaagtctttaatatagattcggaaagagtcaccaactgataggatgtctctaacttgtctaagtgttaatttcaaatgtcttgcacctccgattccgtgatgtctaggacagctattacgtgtacctgccctactccttctatatataatggtgtaaacaaactagttaactcgactaggttatcatgtctaatcgtgatagcattaaacttataattacacccataaataacttcatagatgcccataaaaaccctcctgtaatttatacttaaagtatatcacttagagggttaattgtcaataccaagcaggcaaagattgttcataatcgaaagaccaaccactagagtttaaaacttctcctatctcgtttacactctttgctttcctaatcttctttctagcatcaatgtgttctttccttgttatactactatataaggtttctcctaaccttataagaagctcgtctttaaactttttgaaggtttctccttcgtaatagtctgcccattcccatgtaatactttgtgtgcctttaaatactttactgaaccctgatatggttatggtgtatttgattgtcattggtaattccttcatcgtcttatcccctatacccatgaaatctttctattttgttgcgggcggaacacttctaccttacgtgtatgaatgtccctacctataatagcgtaaggactataatctattacttcatacaaacgtacagtgtagggatgttcttcccttataaagctactagcttctgcaatactgaaaaccttgttaacaatgcgtactgccttcattacacaccactgcacctttcttgctcttcatagatagccatgtcttcttgcaattcgatttctctgtctatacacttataacaggtttcgaaggtataatcgaagtcacaatctaattcactcactaatcttccacaactagtacaacgtacctcattttccattaccttgcactcccaatatattataaaaaatatctaacatctaattatcctccgctatttcgctttaaaattatatacaggtttgacaatcttttgaatatctactgtatctttgatgatttctttgatttcgtcagcatttttgtatgcttttggtgcttcatctagtgtactttgaacaacagatgttgtatagataccagacattgtttgtttaaattcgtctaagtcaagcagttcttttgctttagaacgagacaatacacgtcctgctccatgaggtgcagaattattccaatcagtgtttccttttcctacaccgatgatggagccttctttcatgtttaaaggaataacaagtctaacaccctcctgtgcatctgtggcacctttacgaatagtgttggagtctacatcaatataattatggatagagtcaaataagtcaactacattccaacccatgttagaaacaatcttatcaatgatagttttacgattcatgtaagcgtaacgttgtgctagttgcatatcatttaaatagtcgtccactgcggaaccttctaagtatggcaattgcggtttaacattgacagctttaaaattcttaatagcctcttggatttctgactgtctgccttcttgcttaagtgtctcaatcatagttgctaaacctttgtcatcacgttcatggtataaatccgctttcttctggtgatattgggctactttaagtcctaaagaacgggaacctgtatgaactaacaagtagtaattgttttcgtcatctttacttaattcaataaaatggtttccaccacctaaagtacctaaagacaaggtaacacgttcaataaatggttcttctgttgcacctttaaacgtcatagattctaacatgtgcttaatcgtattcggtacagtagggtgaagttcgtccaaattttctctaatgttaaacccagaaggaaccactctgttaatcactgcatccaatttagcccattcggtatctgtcgtgtcttctggcttctcaatttgagctaccataataccacaacctacatctacaccaacaatagagggtacaactcgattaataccgtctggataatgaatcgttgtaccaactgtagagcctttaccataatgtgcatctggcataattctaacaatgccaccgtctgttactggttcattaatcattgttgtaacctgaccgatagtgccttcatcgactgtgttaataaacattttcgcatcggtatatttaccgttaagttcaattaagttattcatcagttttctcccccaccaacacttttctcatcttttcatctagtctacgtacaatctcttgttgttcctgagctagctttgcatgatattcacgctgttttttatacttagcgtaagcacatagttcctctgtagttagttcttctaatttacgtgtaaatggtgtagcttcaaattccattacaagtacctccttgttttctatacttaaagtatatcatgtaagataaaaagaagcaagcagtttttacactacttgctatatttttttaaacaaattcttctcttacttctccccaactttggtctgggtctggtaagctaaaaggtagcttatcctgttcttccttagataagctctgataacacttctcatgtactgcaatggttccagaactcccctgagcaacaggtaacacactaatcaattcccgcatagcttccctaaactttttatagtcttcgtcatcatcgttatcgactaggacatacacatcacattctgctttacgtgcatttgcaatgttttcctcactaggagcatcgtagaaattttttctttgtagttcaagatacttgactgctttaattagtcttttagcatagtttttagctatcgggtcaacatcaataccattttgtaaatattctactaattgatacttcgcatcccctgatgagataccgaatagagataagtaacttgtagataaaatatctccacttggaagtatcttgttagaaccaaaatggtgagaatccgccctaccaaactctgaatcacatatctcagagtggctattaggatttggagcaccgtctactgtatggtcttcacctctatagtccttatcctccatgacaccaccatactcattgtagtgccctaccgtttctccaattaactttccctgtctgacatgttttaaccgacaaagttccccaccattaaagcagtcacccacaatctgtgtattacatactggacaaatataaccaaaacaccccattagttctctcctcctttttcacttgggtctacaaacggaatatctattgcaccaaccgcttcataataaggcacaacccgatatagcgttcccggacgatgcttactagaatttttcatagcaccttctgctctgccttttgttgtatgaaccccttttacagtaatttcaccagtaactctgtgtttcatttctaatacatataatggcatcttacattccccctacaagtttgagaccttcgtttttaaaggataattctctagctttttctatttgttctagtatacgcacagcttgtgaagcaccaccaaagccattgttgatattcacaacagaaataccagaagtgcaactagttagtgcagtatttaacgctgtgtaaccatctgctgaaataccgtaacctgttgaagttggtacagcaataataggtaaatcaattaaacctgcaagtactacaggtagtgctccctcaaagccttgtacagatactaccgcattactctttgtaatatcatctgtagaagccattagttttttcaagtcatttacaccaatatcatgaaacgacacagggacatatccatttaaaagtacggttaaataagcttcgtctacggtgtctctatcagctacacccgcagatgtaattgccacagataggtcactctctgtagggtttgcacgataaaacgctgtctgactagacttgcaatacacaaaagggcttccttctccccaattatctatccaatctggttcctctagttcctctgctttttctataatttccccccaagagagaacctgtgatgtttcaaaaggtagtgcatagaacacgtctaaaggtaattttgttaccatgatatttgtatctgcgggtacctctgcaatctgactggctagttcctgtgcagttttatttccaccaaatagtgtacgtaatttcattagttaatctcctctaaaaatttagttttgtctactggttctatcgttccatcttcctcggttccttgaactttgaatagcaagaactctggcatctcacagacaacagcagggtcatatgctgtttccgggtcacatgccatctcaaacatgttagtgtctttgttatagaaaaaacataagtccccgattctttcatcttggtataaaaagtcagcaatgtaaaacgccatgtatttcatactagtttcctcctgttattttattgtatagtttagtaagaaatccaatctttttattgctaggttcagttaccaaccatgttattgttagtgatttaattcgtggactcaaagcattttgcagataagttacatagtcattctcttggacagatactgaataaccctttcctattaaaaatcggttaactgcctctacctcctgcttgttaatattaacgtcagagataacacaccagtattgccctagctccactgcttccttaatactaggtagtaccttatttttaataaaatctacggaattttggactaactcttcttcgatttcctgttctttttcaacagtcttattataagcctcctctgctgacatcattatgcaccaactccaatttcttcatctagctttaaggatttaatcttattactaaacatgttagcttgctcattataatgtaaagctaacaacatcttaatgttattttcaaactcagatgcttttgaatctacatatgcttcccgcactagtgaatacattgtgatgttatctttacagaatgcccaaagaggtgtatccaactcactttttagcacacgagttttaaacagatagtctggctctttactacggttctcaatctgcttttctgtaattttcaagtcttcttctcgtattttcattacacgagtggtacatgtaaagtctccttcaattacttccgatggtctaacatctactcgtacaccaactaaatataaagaatcctctcttgaaatatatacaggttctatgtccacaatcttagtgaatgggcactcgtaaccattcttagcaaaccaatctgtaattaaggcttgtaactcatcttgcttatcttctggaatttcatctgttaggtagtagtcctctgcaacttctccaacttcttcatagaccatctcttgtgtacgttccaagaatgaatcaacatctatagggagataaaccggagccactcttccaactacaaaactgttgattggttcttctggtagaaatcctaaaatatcctctacgtgttcccagatttcctctacaaaagttttcccatttctaatggcatctacggctagtttacctgcatgaatagcctcttccttggtatcgaaataagcacaagctctccaaacttccacatctgtatcacttgcacacatccattttcctactaaagattcattactcattttttctttcctcccattttatccttatctagaccccatatatgtgcccatttacgacaaaagtgtttatcataatctaagtccataccggtagcaccttcgaagtctttaaactcttcataaaattccgattctttaaactcatcccactttttcaattcaaccatcctatacataagttggtcaaattgatagtctggtattttaattgcatctaattcataatacagataactgtgtagtagtaaagcacgctctgtcatatttataaaggacaggttatctagtatagtattatttacaacggtcacttgttactcccccggaattgaaattattacttctatatctaacacagccataatcttaaacaaggacggtaagctaattacagttaacccgttttcatatgtagaaatggctttttgtgtaatgcctgcctttgtagctaatgcacgttgagatagaccttgttcttctcgtgcactatgaatatatcctcgtaatgtatcagataaggcacgtgtatattcttctgtgtcatctttattaacacccagttcagcaactgtttcggttaagttgatttccatgttttctcccccttgcctttctatactcatagtatatcagatacctttcagtacgtcaacaactttaaataaaaaaatcctagtaaatactaggattttttctctctttttattgcgtctgtgagcatctcactaaaacaggttcccccattatagaaggtaaacaaaaaattatacaggtctgattcaccctccacaggagtaagtaaagacacttcatcattatctaagatagtttgttcgaccgcatgataaaggtcatcccctactttgacatagctatcgtaattctcttctaaaaaccactccatatcactatcataataactaggtcgttctcctctactttgtgtaaacaagctaactgcttgatactgttctgcttctgtaagcttacgtaccttacctacacgtgtttccatttctgacattataatcgctcctgcattaattttattttgctttcaatgattcccttaacacactcccagtaccacattaggtgctgatattcattctcagagacttgtgttgttagaaatctacattgagcgggtattatttcatgctcatcgaaatacaataatatttggtttctatcgaatatagctgttgttaattcccgttttgggcggtcactaatgtgcatctctaaaatggtatacaacctttgtatattatactcctcgtctaggtttatacttatcacaaataaacctcgttctttataacgattttcgcactccacaatcattgtatttactaactggttatgcttgatgtagtccttactttttacatgcacgaatactcactccttaaatatggtcttcatctttaaatgtttcataggaatagtgaacctgtgttctaacataaaagaccttattacagcttggacaagttgtttcccaaattgccccctcctccacattttctgaactatagattccagagtgatacaggtcttcctcgtctttcatagtttccttacaaaatggacaagtagggtatagttccttctcttctataatgtatcctttatacatagtgactctccctacttaaacgcttcgtctaaatcaagttcacgttttgcaatttcagtgatttcttcaatggcttcttggtattctcggatagttgtaatctctttaccatttcctcctaagacccaatgacgttgaatcatgtgtaaagcttttgtaaggttcgtttggtaaccgacaagcgcaacattctcgtttccttttttgtcgtaagtgatttctcctttgtcgttacgaaccacacgttttacggttacgttgtctgcatcactagtaatacggtagtctaatactttcatgtttaacattatttatttcttcctttcattcgttggtttcccatacgaggtttaaatttacgtggtaaaacacgggtattgcgtttagcttcattgtatttacgtttaagccgaacctttctgtctgactgatgttcaaacatgtctgcaagagcggagcagtaatcaatctctgcacgtactttttctcccacatatctttctaaatagaatacatcaagagctactttactatagtcaatatcatatcgactaatagtaacaatgcgctcaactgtgtatctatcacaaatagagaatcgtaagtaaattattaactggtcaaatcttaagtcataatagagtggtttaagatagtccaacttaatacggttatctatttcgtataggtgttcttttgtatagtctaacagagcaataattcgattgtctgtctcattcatttctaacgtcataccttcgtcctttccggtgtgcattgatagagtctacaggtacatgtcttagctgaaagcttgacgtattagactcggataaaagccccttacctagacctgtccgctaacagcggataatattatctaggtaagggctaaggataaacacaccctatacataccgttaatgtgacacgcccggttcgttactgtcttaaaatgaggtctgttggtagtactgagtagcgtttttcatccactggactcagcccatctttaccaaggactgccactacaagtttgtcttcatcgtatcctgtaactaccaagttagcccccattagttgttcatttcttgcataaagtcctgccggtgaatagagaacccaatccccaatgttaaatacccctttaaggtacttaccacacattggacagtacttaataaatgttctagcctctgcggtcattgtcgtacgaacattcccataactgtgaaaactaaactgtgcacgcaatacattatggtctacacctataccaataccgcctgattcatcttctaaattataaagtaatgctccaccctcacaccaattacacatgttgctcctccttcgctttttggatttcactttgtaaaaaattaatgtaccttggattttctatattaaacatatctttaacatatacggctcctagttctctacgatacgcatagtccacaccaatacgtctatagaactcatggttaacatgatacataaactgatggaatcttgtatgctgtcctcttaaatcatacagctcctgtaataggtcacagatttgtacaaattcttcctttgttccacttgccatgatttatctcctccttacctgttacctaaagtatatcaaaacccagagcatctgtcaacactctgggtaacttttttattgtacagataataaggaagctacgttaatgtaagtaatcaaacctttttctacgtcctgtacaatcgggtactctgctttgtcttcatacatgatgttatctcgtacatatagcatctctgattcaacataacggaagatagcatctgaactacctgttgttgctaatcttatccgtttcttatccgtagggtttgctatgactgcctgatttttacttagcttacataacaacttaaacattcttgtaatgttttcatcttctaaagccggagaagatgttgttttcttcttcaatcgttgttccatataaattggaattgcttgtgcagataacttcatcgtagtatcactatttaagaagtactctgtagtagttaaaacaacctttgattgttctaagaacttaagctgtaaatagcatcgcaaatcatcttctgagaatgatttttggtattttgaatggtctgcatttatccattctacgatgctacttaagaaggttacaggtctcttaccagagtaagaaatactgatatagtcagacgtatttactacctcttttgcacaagagatttcatatatggtagccccttctaggtcgctatcttcaccgataaaaatagtagttaataagctacttgggacaaatcctacatggataaattcttgggtttctggtagatgagactcaataaaactacctaaaagttctttccacaagaactgctcgtccttgactagtgcttccttcttttgaagtttatagaacagaaggtcaaacgcagtataccaatcttcggaaatctttagtttagttaattcttcatctaccggaatatcaatagtagcagacgtgtcttcctcaacttccgtgctatctaaatcattatcccataaatcaaatgttttacggagacaaaactctctccataatgtatcacttgggtcttctccatattgcaatagcatctgctttccaattgaagttagtgtaaccttacctcgactattgataccttcgttataatcttgaatacatcctttataccgcaaagaaagtaacatagtgttagttgctttatcttcgataagttttaatatttgtttatagccatactccatatagaaaacagggaagttcttttgctcaacaaaagcttcgtgctccacctctaacccacgtttttgtcttcctagtttatcaattatacggagtgcctctaattctcgttcctcaatagttacaacatactgactgattttgttttcgtaagctaaagcggtgttcatctcttgcaaaatctgtttaaataaatcgtttgcatcttttgccttctgagtcttaaatgttctgattgtcgtatcatagaaacgttcgtgactcgaaatagcaaactgcccaatgtatcgtttaccttttaaatttaaacggttttcgttacgatttcctagagtaaacgttacgtagacagactcactagacttagaaaaataaatgtcttgaacaactatgccgatagtttcaagctcgtttatacgtttagtaaagtcactctcatattgcggtctgtttatatttttgtagtgttttctatagtgtactgcaacagttttcgattcttttgccacatccaattacctctcttatctttcttcttttgcaacgtatgcttctaatacaatagttctaatcggtgcttcttcatgtacttcatcttttaccttcttaattacaccttctcttagcagtccttctcctaacttatgtgaagcttctagcattcgtaagtttacaagctcgtcactgtcaaatacactcacatctaagcttactctgtaaggtaatacttgttggtatacacgggtgactgttaggggttcccctataagaggactcttcccaactcgagaaaatgcccagttatctagtttttggttaaaccgcttctttaatctgtctaacatgttttcacctccatgtatatagtatacatgttaagccttacaaaagtcaacaataaaataaaaaaacatacaactaagtatgttttttcggtacaaaatatttctcttgaatattaccgtctttatctacaacaatgccatttaactgtccgccataggcacaagcaccatcaataaagactgtacggtctcctaaataaatatcacagttattgtctctatgaaagttaactgtaggtgtatgtcctacaataatagttttacttgtttcgttcttttggaatggatttggtctagtccaaagcatttcatgttcctctgctgttttccagtctggctgtctccatcttgggatacctccatgcacaaatagcacgttaccgaactcgtagtaaggttctaggagttccaaggtgtcttttacattagagttattaagaagctctgtacgcaacgctagggcgctaagagaagctgtcttagttcctagaatagaattagcagtctcttgacctccttgataataccacactgagtatatctcttgcaagtcctcataatctggttctaatcttaatgggaaactaaggaaatctaatagcatttggtcatggttccctttaattgctgtgccaccagaagccatatgttcataaacaaaacctagaacttcttttgattggagacctctgtcgacataatctcctaaaagaaccaattcctgttcttcacgattccaattttttaataactccataaactcatcgtacataccatgtatatctgatactacgaacgctttctctttgctcattaatcgtcctctactttctcaaaatatcgaaagaacgcataccaatcatatcgttcagtaacctgcttactctcgtgcataaatacaaactcaacgtatttgtgtttaactgcatgagggtctactggttcccaaggaagcctgcgaggataatcataataaacttttgttggaatgacttctcgcattaacaatttagggtaccgctttttaggacggtacctttttcctaaaacatgttcgtatgtcggtctcattctattgtaccatgtttcgtataagttaagccggactcgttgaaatgcttttccttttcctcaatcaggtcaatacactctttaattgtgtatggtgtcccaaaagggtgcaaagttaattccggtgagtcaatgcctacatttagtaaattaggttcttgataagccatctcatgaatatgtccatgtaagtttactcggtttcctcggctaccaataatgagtggatagtgtgttaaatggatgatttttctttcctgctttagtattacgccaacatcactccaaaatactcgttcacgtaattcctcatcccgattaattgtttttaaaagcttggtactgtcgtggtttcctttaaccatgataatgataccgtttagcttacgaagaatctctagagtatcctttggtttctggttcatagcaaagtcccctagatggtacacagtgtcttccggacgaactcgtttgttccatgtcttgattaagtaatcgttcatttcgtccacatcagcaaacctacgtcttgtctctacaaagccatcttctccacaaatattgtggtggttgaagtgcatgtctgaaattacatatgttttcattctagcaaccctcccaattcaaagttatcgaaacactctgcattgtatacattttgaatggcattccgatagaactctacagtctctagactaacgggtgtaaagttgtgtacatctactcctacatttagtccgtcacgtttcaccttttgtttttcatgaatatgtccaaataagccaaaatatccatctttgattttatcttctgaataactcatatgggaaggctcatggacaagaactaatttttggtctacaagagtgacaatttttccttttcgaacaaattcaaagtatttttcttgttccggagtaataaacccacctttaccatcccgttcatagttaccaaataataaatgaattttacctttaagctgtttagctacttcgaagttaccgaaatctcctaaatggtaaacagtgtcttcttcatctacaacatcgttccaccgttctatcatagctaaatcagcatgttctacattatcaaaatacatacctcgcatagaatatttgaaagtacgttcttgtccaaagtgtgtgtcggacgtaaaccaaatcttactcatttacatcatctccaaacgttcataacattttttaattaccaaggcatcccacattgcattatgttttacaccctccattgtttcaccattaccaagaaggaacgcaaactcttcacgagaaatatcagggtcaacgcctttaaccttaaataacgtacagatgtcaaagggaatatagtacacgttactgggtatagagagcgcatccccaaatagatggttgaacaacacccaatcatatgaaagacaatctgaccatacttctacagaattaaactgcgctagccattcctgtagtttttgtgcgatatatgctgtgtctccatagtactgattttcttcttctcgtaggttttcttcccctactaaattatcaagcacatgcgcctgtaaccattcgtctacttgtgtttcatcgtaatcgtttaactctgcataaaatgatacaccattttcagctataattccaatactaattagtgtagtgtctttatgcaatcctgtaaactctgtgtcaaaaaagattttcatgtcttactcctctatgcaatttaattatgattatgttgtgactattaatagaactaacaattgaagataatgaactgtttggtcaattgttagttgtgttttggggtctggtactatcgaaggaaaccatgtactttgtgctttgagatagtccattacaaaatgtggtaaccatagaacaagtaaaatgtgtgctaatgtaatagacaaaccaattaggtaacctgtcatagcaattgtaaaagtccaaatagttgcatggataaataacacgtataggtctcttgttttttctcttgcaatatattcactttgtagtgcgtagtctcctaaagcatgtgcccccactaacataacaaacatagtaatatatggtgtcattatattctaccaccctcatctaatagtttctctaacggaatgaactctgttgtccgtctaagaacaacatctcctgattcttcaattgtatcaagccaacgtttactaccatcactcatacgaaacaatcttaaagggtatcccatttcatcatattgtatgatatttgttctttcgtatacgtaaggctctggcttgttttttaggaagtcgaaccaacccattcctacccctcctcagttaatttaactattatttttaccgggataatttctaagtccttgtattttctatcgtactcgttacgctcccgtaaaattcgttttaaagtatctcttctacttacagcagaatcatacatggtatacgcttgcgcatctgagggactagaagaccacgcatataaagtcagccctgctacataatacatatacatatcccattccatgtcgtatactcttataataaattgattgctcatttaatctacctcataaccattttccaccgcacggtaaaactttaatatattacagtattcaccaaaccagtcttggacgaaggtttcccagtttcctttgtagtaatcatcaatgacagagcggataacatattcctttgctctatcatttctggtacctcctgcattttcaataatctttgctataaaataaggaactctctcttttttcataattagtcttccacctcttcataagtatctgcaaaaatatcaggtttacatggataaacttcaccttgaatgcctcgaataacatagtctccaacagacacgtgcatccaaccttcaagagtaagaatataaagttctccctctttaaaccggtaatttgcctttaacatccattctggcacatagtagtttccttctgacataaaatctccatcaaatttaaacgcctcaactactactggtttctttcggaactttcttccttcttcttctagttttttaacatcaacctgtactgtttctcctgcaaatctattataaacgtagtctttgcaccaacgtacattctctgcatgacttaaacaacaatcaaaatcaattttaaaatactctccattgtgtgttccctcagtacgatacttcatttcactgtttcccccttttctgcaactacaggtgtgccatctggatgcaatcttacagtcatcccaccagctctatccccatgaaaaactaagtattgcacttttgtttccgggtttgtatacaccgctatatctctagaatctgcattagtacttttaatagtatcttcatttgcaacagaagagacatcacatgcccctaaaaatagtaatggcaataacaacaacaattttttcattttatttcctcccatagttctgtaatgtcttcctagtcttcgtcattaatgacaccttcaatgtgttttaactcacgcatcagtttaagaaaagacttcgtatccagtgtaattgatgagtagttacgttcttcttgtatagtaatctctacaaccttgtcttcttcatcgaaacttcggcggtcttcttcatacgttaccttaacactactgcgagtgtcctcatcactatataatgaatagtatctatcagttcgtatttccattttaattacttccctccttttgttggtcttgttccgtttccttgtacttttgttcccctatacttaatagcacagtcagcgtgctgtagtctccaatagccattctttctttcaaaatgaccctgacctttctctacaaaggtaccgcacctgtaacaataccccggatacttattgcgcatagtagtctcccctttacacaagttctaacgaaatacttagtataccagagtacctatcttttacagcttcttctacttgattaattgcttcttctagtgaaatagttgtattcgtatcctcggaataagtcttagataaaatccttattgcatgaacttgggaaacctcttttagttcaactgaggtttcgtcttcatcatccacataagcttgctctttgtatatctctaaagctttgctagggctataggctgatataagagcaaaataaggactagttacttcatagaacttaattcctgttaagttaaagaaaggtgttacgtagtccattacgccttttttcatacgtagttcatttgaatgttctaaactatcgtagtgctctttttctactacaacaacctctactactttacctttttcaacttcatttggggtacatagtctatctctagctccaagataactacacattagtgcatctttaactatcgttccggaagcagtattatatcctgttttataaaaaccatcttctcttactgcaacatataactttaatggctcactcatcttaattttcctcccttacaggtatagcaaacgtccataaatctgcattaatttcttttatctcctgctctgtaaaactattcttccaagttctacaatgcttattctttttaaccacggaaaggtgagtataagtctccccggacattgttttattttgaataagataatatgtttcattaacaaccgttaacttaacatgatacaacggttcttcaatcttgtaaccgagaatacaagcccgctcaaactcataacgacaataagctatttcaaagtatttatccaacttttctaattccaaagtatctggtaaatttactgcatccagtggtctatcttgaaattctcggattgcatcactgggtgcccaattacgtttcgttacccaatcaacaaactccgccacaaaatttggtataactggtttatctacttcccctatctttctcattattgtaattccggcatttataccctcgttatagcaaaagtctcttatatcagttcccgacattctatggctttctaattccttaatcgcttcttgtttattcatagctactcctcctctaaattctcactcttagctagtaaccgaaaattagtataaaagtaatctacagtttcctcatcaatagaccggtcttcgctattggtaaaaaactcatctttggttccattaactaaaagtatgccgtcatcatctattgcttcgacaaagtagacctttgcttcatggctacctctacgaataactaagtccccaacatatacttcccacttaggtgcccgctctatttcatctggtaagttaatcttggtaaaatgtgtcatatactctggaaagtcatcatctaatggagtaccgcaataaggcgcttccctaataggaaactcccaccaaaggacgtctcccatatcttcatgccacttatcagctaagtatgctataaccccctgagagttatctcgataatcttctaacgaacgaatagcattttttagataaacttcttcaacatctcgacttttattaccaactaaaacccgtttaatttcttcaattgcatgttcaacacggttcattattatccctcccttaaatccccaaattttctgtctaattcaacaccaaattcaaattcatcagctttcttcgataatttgcacatatcttcataatttttcttgaagttcttatgaataatcggagagcaataacctgtctctattcgtgctaatgaatacttgactagtctagcaattttatactctaatgtttggtaattaacaataatatttaatttattttttgggttgtaccactcatgtgtatatggaggcattgtaaccctattctcaaaccctaaacctgtcaatagttttttgactgcttctgtattaacttctaatgtgtccatgtctacctccaccagttaggttctttaataacttgccacgctctttttagttgttcttcgttgaaatgcccaaaatgacaatcctctttaggaataccaagcttacaagctaacacactgtacagctctcccctacttatctgtctagacttccatacagggtcaaataaactgtgacatagttttttccatcgtttcataggtggtgtagctaaaatacctagtggttcttttggtctgttcttgtgagtccctacactagcaccacaacctgtacaataataacatttaccattaccgtaaactttcccatatagtacttcattacttgtccaaataactttagctccacagtaagggcagttatctggtactaacattttatccatgatttgttcacctctcatgtatacagtatacccctatggtatcagtaagtcaacacttttttacaaaaaaaagaacagcatttctgctgtcctaaaaatcacaccaatcatctttatcataagaatcatctgtgtagtgttctttacctttaatgttcttaacattaacatgctcgtcttcctctggttgctcttctttgtttttcttgacgaagtagtaaccaatagagaaagctatacccccaagcaacagtataataagagcgataaagaatttagcaatgaagaatcccattacttgtcagtgtccacgattgcttgtccgtcaccgattgtagtagtaacccaaccgtgttccttacgagcttgtgcttcttcgtaacgaactaattcatccgtaacagattctgcaattttcttgttagcttctgcttgtgcattagctttgtctctaatagcttgggcttctgcttgggctttcaaagtaacttttgtagcctcagtttctgcttgtgttttttgagttttagcatctaactcagcttttttagcttcttgtcctgaacggatgattgcatcaattgatttttgtgtttctgggtcaacgtcaggtacacctaccgttacgttttcaactaagaaacctttaccttcaactgaatcagagaaacgagctagcacttctccctcaacctcagaagacttacctgaaagaacatctagcaagctgtacttagagtaaacttcacgagcagtcttttgtagacgagatttcaaccaacctttttcaatgtcctcagatgttacgttaccaaactctttgtacattttagttgcctgtttagggtctactttgtagtcatacttaatgttaactacagttttcttaccatcagatgtagaaaccgcaacatctttagcttggatagtttgtaaacggattgggtattgtgttactttatcaatacctacccatttaacgccgggctgtaatgcttcggatttaacaccaccgttaggtgagaaacgtacacctacataaccgttgtcgattcgttcgaagaaacggaaagcaccgattgtacctccaatcaataaaataactgcaaccactccggctacgactaggcgtttaaacgtcttctcggtcataaaaataattcctccaatatttagttttttatgtgtaagttttccccttacaaatagtagtataccttacactgtataacaagtcaacaacttttttttattttcttgtagaaaataatttaatgggtgtatggtcttctccttcaagatacttaccatcttcccacaagaccactgagcctttctctaggcttctctgcacatcaatgatacgttgattccatgaaccacggaaaacaaggttagggttgaatttatcctgctcaaaacgaccatctactagtacatctacgtaagataataattcaagcttatcttcccagttttcagcgttagaatctgtaagctcttcaaatgtgtaacctgaccatgaccatattgttttacctgttagctctgatttaatacgtttagctaaaggcaataggacttgtgtatttaagaaaggttctccacctaacaaagtaataccatcacaataatcttgtgaaatatctttaaggatttggtcttctacttcttgggtgtaatctttaccccaactaaagttttgcgcctttttattgtaacatcctaaacaattaaaagggcaaccggagacgtagatacttccacgtaccccgataccgtctaccattacaggaaatttataatcagcatatttacctttagacagtctttctgctgtccatgtcattgggtctttactcatctgtatttccttctttcttaacatgtaaaccttcgtcataccctgattgtgtaaacttagcttggcaaattgcacacttataggctttgtaccctaaattgttatatggtaccacttggtcttccccatcttcatcttggtgggtacacgctttttgtagcgcatttaatatttcgtttcgttgcttgattaatcgttctttctttgcaagatgtctacgctcttcatgtagaattgcagactctgcaatagctaaaagattttgtaaagaggaagctgtactcattaaattgccacctcataattaaatcttccgttatgtttgtagccttcaaccttaagttcagatagctggcactcaaagaagttagtcatgtcagcctcttcccaaggcaatactagcttaggttctgcatttagcacttcctctgtcataggagcagttacttgttcgacagcttgttccatatgacggtcgtagatatgtgcgttatcaatgttccaaaacattgtacctaactctaaatcagataccttagccataattaactgtaacgcatgatactgcaatacattaaatggcaatcctaagcacacatccgcactgcgttgcttaacgtgtaagttcaacttacccccctgtactgtccagtgagtagcccatacacaaggttctaatgccatttcatctaagtcttccacatcccatagagttgtcataattctacgagaacttcgattatattttagttgatatagaacagtttctacctgattaaacttaacgtaacacttgtagtcttttgtttcagggttaacatcaaccataatatcctcttcgggaaaaaagtcctccggagaagctacataaaattcattatccatgtctaattgcactttacgttttttatttcgcaactgccaaccataagattttccgattgttccatcttcttgttcccattcatcccaaatagtcactccacgttcttgtaaccacttgacatcattagacattgcttgccaaatccactctaattctgtaaatgcccacttagagcctacaaacttactcttaagaattggcagtcccatgtctggtgtaatttcaaagcttacaccttcaattgcatatgcaggagcaggttccccatcttcatagtgcgctcgtacttcatcggggttttgcaaaatacccttttctttgatggctaacacaaggtcagcataaattttgtcaaaactcatgtgtgttctccttttctatgttcgtctaactatttcgtctaactatattgatagagtctgtatacccatttcttcgtacccactctgtataactgttgtgctcttcttgcgcaatcgcttttaaagaaccataccacttcttgacttcttcccgttttttacgtttgaatactaatgatttgcttttatctatgacgttgataatcttacttactccaccagtattatctataagcattaatcgtgaaacggtcggttttgagggaaacatctttttacattccctacatagttcttctacttgcccacctaatgcacgcaaatccgatactctacgaccgcaacgtatacactcagttccgtaagcctgctcgaaatattgtgcgttaatacgaggaaacttttgcgtaagtcttaggttagttgaaggtgttttaactctttttcttagtactgttttgtttttcttaaccttaacactaactgggtcattaccatcaaaattaaaagaaaaactaattgttccagaagagttaattaccggagtaactacattgcgttcttctcggtctgctaacacccgtacatctgttatacgaggacgggttttctttgtgaataatcgtcctcgtgtgtagtctataccttgcatattacaaacctagccatgaacgtactttgctgaaaggaggtttcttttcaggttccttgtactcagagtttgtacgttttaatttatcattgtagttatctgcaagtgttaacaattcatcaggatttactgtttcacaataaaaagcaatctcttccccagttagctctctattttcttcaatcaatttatcaagagtcaaatcgcaatactcatcttcccagtcagctaagaagtacatacgttccatgacataatctgatgtttcatctaagaatataccgaatagaattgggtctttatctcgattatcttttgctacttgttgacctacttcatctgtatagtctgtaaacatgataactaagcggtcaaatttatcttgtacacgttcgattacaggaacaacttcatctggaatttcacggggaaaatctttaaggtcagctagtttaactgaacgattttccacattttcaataaagttttcaatatcctctgaatacacaaaagttgtaatgcccatatctcgaatttctttttctaattggattgttctaatatgatggcgtaacaaagaaatctgtctatcttgctttgttttaattgccttttctaacatacgtaatgcgtttgcgtaataacggtctaggtcggcatcttgattttcctttttattttgttttactcgttcgaagaactctgtaggtgatagttcttctaatggtttcgttgttaagttttcagtcatgatacatcctcctaaaaaaatattccttacaggaaataatatatcacctgtaaggaataaagtcaacactatattaaaaaattgttgtaagcatttgactgtggtctaacgctaatacagcatccccagtaacacgcccatcacgatatagaataattgtagtatcatcggttgagatgtctactttagcctcgtgagaggtgatggtaaaccatacgtaatcactatcagattcgtcttctttacgttcagcatctgaccgcatttgagctatatacatttgtgcaagattatgcccagaagggtctctattagggtctccaaacactgtagatggactaataccttcttcttgtccgtctaatgaaactgtttctaaaatactctcagcaagcatattaggggtatctgtggctcctaaaaaagcgttaggtaattcgtacacaccttcttgaactcggtgtagtaaaatagtagcacctacttctaattgatttcttaatacaactaaagaaacgttaaatcctactttttcaatcatgttctttcctccatttttccatttcatttattttatcaggcaacgttcttcttgttaaacagcctgtagtacttacatgaagcctttgaactccattatttttgcctagaacttcgtctgctttcttatagagcatgtctgtatgttttggacaagctatctcattaaaagatgctccgttatctgctacacttacaataccgtttgcacagaatcgactacgacaacctatacattcattcgctagcttcttcatgagcaacctcccactctgtggcttcccttaactgtagctgtctagcttcttctaaaggactgatataatcaggtagctcatctaccggtgtaaaacgttttgttccgtcttcaagtataccataaaaatggtctgccggacgtgcaaaaactgtgttagcatttggtgaataagggttaggatacattcttcgatacaatactaactgctccccagtctctgtatgaagtacatcatcatattctagtgtagcataataagcacccttataatgacgaaaccacgttccggctctatgcttatattccattcctcttcccccctaaagaaaagctagcactaggctagctctttatttttacctttggttaatttaccactttcatcataccacgcatagatggcagttacaacatttgtttgatataaaacatctctaattgcaaaccagtagttaccagaaccgaaatctagtaagaaccaaaagaagttacttgcaaaccatccccaccatgaaaagtcaattcgcataatcattaagaattgggatacgattcctagcaagtaagcaataatgttaccccaatacatgatgttacccattagggaaccatctgtagtaaagccaattttatctccgtacataattaagacaattaaacctacaattgtgaatgctaaagtaaatactacccaaaaagcgttcatcttacctactttaatacgcccatcttcatcttgattggattcttttgtccactcttttaacccgataatgtgtgtaataccgtagtaaatacctgcaaaagccaaaccgaagttcccaaacatagtattaataatgatttcaccaacgttagaactaatacctaagatatttcccattttaggatagcggtctgctaaagataccacacaaggtacacctaagcagtacgctgtgatataaaataaccagttagttttatctgaccagtcggtgacaaacacccccacaaccagtcccagtactaccaaagtgattgcgtactgtttgcgccatttcccattagctagtgaaatattgtccataaatgttttcatattatttctcctccttgttagtccaaatttcgtcaacgtataattgcaacgtgtcaactgtagttccttctaggtacttttcgataattttcttgcaaagttcataacgagtttcataatcactcgcagttacttccacatatgggatatgattctctgcatataatttcttcaataggttttggaagtcttgtctacgtttttcatcaccgattaaacgcataccatcgtctacccatttagtcgaattatctaacaaaataaccaaatcaaagcggtcattatcaatcttatcttgtacagatggatgaggttttccttcgtacgtaatacagaaggcttgtgtggctacgtagtctgtatccgaaatagtaaatctattagcattacgtcttgcaaatcgaacgtcttgatagtgaccattagcaattgcttggtagtcactgtactgtaatgcactctcatctccacctaattcaagttcacagtagttacgaccgtactcccaaacagtcgtagtagcaaagtagttacctagcttatctaccatcaaagttttaccactagactctcctcctgcaattacaattgtaggagccaatgcttcccggctagcacgaggtagatagtcccagtacttaatagggttgttacgtacttttgttgcactaatattaacattagaacgctctgggtctactaatattgtaggacagccaaagtatttttgatagccttccgcatcctgtggttcacttgaaaagaatgttgcttcctcccaatcaaaacctctttcagccaacacacgattacctgttacagtctctttcacaaggtttgcccatgcttcccacccattagggtattctggaatgtttgattcatctactaatacaggaataatgacatctcgttgaacttgaaaagtcttttgaacaattcgtagtttgtctcgtgctgttagtggacgtttcatgttagaatccatgtataaacggtcgtctctactatctgagtggcttaccactacaacaagagtctctacttgtgtgcttgctttttgaatcatatctacatgtcctttgtgtaagggataaaatttcccaactactactccgaactttttcataccttattcctccttttaggtattttttactataattaattataccacactttactagttattttcaatataaaaatagccataaattaaaccaattgttagtgcaatccacccgataacaattaataccgtagaaaggattcctttagacaatttggactcaacaaatttatcatatgcagtataagaaacattaatagcgctgtctttacctctgactgactgtaacccattttcgctagcatccgcaaggaaagttaaatgtagcttcttaggtacaccatagtaggtaatacgtacatctgatgataagtacttagtagttatatacttgccatcgaacccagtaaacttgttaaagtcgtatatatggtcgtgtactttaactttatcaacctgtttagtcttagagccatagtatacccattcccagtaagtttctgttttagtttgtgtattacctttctcgtctacataactaactgttctagtccgcatctcatagtgttcctcttctgcaacaactttcatgtattccccaccaatacgaggaaacgttactggttttattgctatgaaatcactatgcgtataaaagataccttgttgtgtatctaacacgtaatcatacgtttctttatcatctgccggaatagcagtttcgtacatttgattagattttatccggttctcttctacttttccatgtacccatattcctagtaaactagttaaggtaacaattagcataggaataatgatgaaccggattctaccatccacccgcatcatttgctaaacaggtctgtatgacctttaggctccacaggaattgttaacaattcataatcttgtacttcgtatccttgcagtgcaagtaacttacgatttaagaaagttctagtgaatcgtttataatctgaaatttgtcggttataagctttacgatgactagcaacccgattctctgtaatactgaactccttcattgcttgcttataattgtcttgtgatttgagttctgggtatttttcgactactgcatttaaagtcgttttagctgagtctactttaccagtttctgcttgctgtcttgctttaacaataagttctaacgtactcttttcatagttattatagctctcaatagcatctactaaattttgaaacaaatctactcgtctattttcctcagtatttaaatccccataagcttgctcaatagatacttcgtaactgatagctctattttctacatgttttactccaaaaaatgcaacaatacctaataataaaacccctactagtgaaacaataattgtattcgctttattcatgtgcttttcctcctaagaactgtttaagaatttctctccaattgacatattctgttgtatgccctttgtcatcaatgtaaacatctgcaccaagcttacggctgttatttccatatgctttcatcaaatctggatgattctcattgatgtagtggtaattaataccacattctgccaaaaacctttttgcttgttctaactcttcgccttcacgacatgtccatataagaatttgttttcctgatttgtataggctgttaatcacttcttttgcgtgtggttgtagtcccacaatatttggaaattcacttcttacaatagtgtcatcaaagtcgatagctatgtatttgcactttgataaatctttcatttgcttctcctttcaaataaaaaaggtatacccttctttgctacaagaagaagtataccttatgagtatcactaagtcaacactatcttacaaattatttgtaagaattttttatttctttaatttttcccatttgtacacccgtaaaactaatacctgtagacgtttctacgtaaggtaatgaggttacggacttactaactaaataatctctagcggatggttcattatcaatattatgctctgtaaactcgattccttcacctttaagcatattttttacaaatgagcaaccaccgcacccattcttagaataaactgttactttaaccatgtgttacttcctcctgtttaaaccattttgaacctgtaaatgctacaacatcgttagctaaataaagcatgtaagttaacattaatacatacacagcgtgaccatgaagagctgtttgaatccatagtgctactgacattaaaccttggaatgtccagaagtaatactgtgcacggaaccctttaacacacaatactgctccaactaaaccaatcattgcacttgtagcatctaagaatgcttgtggggaatgcagaataactgtatccaacagatacaatgcaacccaaaatacaacaataagtaccaatgttttaagcatatgtgctcgattcatcttgcgaggtttcaaaccttcattccaacgtttagagaagatgattggaatatccagtaaaataatatatgctgattgcataataatgtcactatagttgcctgttacacttgctactccaataagtagaattgcggaaataaaaccaagtaaaccattaattgatttacccattgtaattgttacggtacaagtaaaaccaattattcctgcaatagtggcagttaaacctgttacagtaataccttgtccttgtaataagggtagaataagtcccgtaaacacttgaataaccattcccacaatccataaaattcttgcaggtttagaccatccagttagtccgtctctataatattcatatgtgaataattttttaatatgttccatcttgctgttctttttagcttccattaatttgttactcctccaatgtgtattaaatatctttacgctctatatcccagaaatgtgctacaacatgataaggtacatcaattccagatgactttgcatgattatagaacttcataactgcttgttgattgctttcttcttggtataattctttgtatgcgttaacggcttgtccctcagatatacagcctaattcaaataatttatctataatttgacttacgatttgctgtctatgttctgggttgttaacaaaatcaatctctgtaacatcgagaataatttttggaaaacctaaatctctttccatccaattttgatagttctcatgatgacgtttgaagtactcgtataattcggtaccttcttctactttttcaaattcacgagcacgagcattgattcgtctgatttcttcttcaaaagaacagtttaaaacaaccattaaatctggtgttttcttaggaagtggttctaactccttaagcattctctctagtaaacgatggtagacaccttgttccatttcgttcacatgtccttcttgtactaattggtctaagaagatactatcttcaaatatagaccggtctaaaataccgttatccacactcattgcttcttgaatcatttcaaagcgtttggataacatatctatttgaaaaagtagtccatattttgatttgtcttggtagaacaattcaagcattggattctcttctacaggttcataaactgcttttgtatctaataggtttgctaatatttctgtcattgatgatttacctacaccaataactccggctaacgtaattatcataaccaactcctcgggatatttattttttgacaatattaagagcctgactagcaggctctaataaaccttacatatgttttacacgtgcatctatttctttcttacgtccatgtgcattaggacgagcttgtggttgacctaaataaccacattgtcttttaacaacatcacatgttgcagggtcattattaccacattgcgggcattcataaccatctgatgtagggttaaactctccatcaaaaccacattcatgacatttatcaattggggtgtttgttccaagataaccaactttatcgtagctgtagtcccaaacagcttctaacgccttaaggttgtgaactagtttagggtattctacataatggataaaaccaccggaagcatattttggaaactctttttcaaagtcaatcttttcaaaaggtgttggagctttgcgaacatcatagtggaagctatttgtataatattctttatctgtgatattctcaataactccgtatttttctgtatccatgcgacagaatctatcagttaaactttcacttggtgttgagtagatagagaaccagattcccgtctcttttgtccattcatcctttttatcataaagcttacgtagaacatctaaagcaaactcttttgcctcttcatgatgtgggtctgttttatcttgccaatcaccaccatagaacatgctagcaacctcgtacagcccaatatagcccatagaaaccgttgcacggttatttatgaacaattgttttacatcgtcatcatcggttaaattagccccaaaagcaccatgtttgtacaagataggagcattctttggttgagcttcgtaagtacgttcaattcgataaaccaaagcatcatgtaataccttagctcgttcttcaaaaatttcccagaagacttctttatccccttctgattcaatagcaatacgtggtaagttaagagttactactcctaaattcatacgaccagagtttacttcgtttccatgttcatctttccatccttgtaagaatgaacgacaacccataggacatttaaacgaacctgttagctcaacaattttgtcatagttcaaaatatcagggtacatacgtttagctgaacattctaatgctaactgttttacttcatagttagggtcttctggtttacggttaactccgtctttaatagtgaacaataatttagggaagattgctgtacgtccttctgtacctagaccttggatacgtactttaaaaatagctttttggatttctctttcccaacgtccagtacctaaaccaaaaccaatagacgtgaaaggggtctgaccattcgatgtaaataacgtattaatttcatactctaggctttgcattgcatcgtaaatatctttgtttgttttctcgattgcatatgtttctggctcaggaatacggtaacgtttagcatctgtcatatgtttttgataattcatttcagcataaggtgctaatacttcatcaatgcggtcaaacgaacaaccaccatattgactggaagccacattcgcaataatttgtgctgtttgtgctgtagctgtttgaatggaatgaggtgaaccgatttctgcattacccattttaaacccgttcttcaacatatattcaaagtcaatcaaacaacaattagtcattggacggtaaggttggtagtctaaatcgtgataatgaatatctccacgtaaatgtgcgttagctacatgaggagggagcattttaagaccctcaactttattaactgtacctgctgtaaggtctcgttctgttgcaaaggtatttgagtccttatttgcattctcattgacaatagttttgtccttttcttgtagcttacgtagccttacattaatgtctgtatcacctgcacgttcagcatcacgtaaagaacgaaactcaatatagtttctagctacgtttttagcaaaagatttcattaattcctgctctacaatactttggagttttgcaatatcgacacgtcctgtatcgctgtaatgcttcactacaaagcgtttaacacgttcagctataatctctcctaaatctgttttagcgcccgtagcatccttctcagctcgtcctacggcacgtacaatccttccttcattaaacttgacagttcttccgtctcgtttaactacaaaaatctgttttgtcttaacatctacatcttgtgttgcttgcactcaaaattccgcctttcttacaatatctagtatacttagtatagcataacaatacttacagtacaagatgtaattgttaacaaaaaataaaagactacaaactaagttgtagtctttttcaacaaatattacaaattgattaattttttctcagattagctcacctaagaaatcttcaccatcatctggtttcttgtgcttatactcatccgttttgagcattaggtacttgttacctgtttctacttgtaacctctcaaaagctctacggtactcctcagcactagatgtagcatctagtaggaacttagcattaaggacggctaaaaccgctagtagctcttctcgactaccagacatctgtaccttaactttaccatcctcagtcgtataagctccgattttattcttgattgccacagttacacctcttaatcttttaatttaattttaggcatagcttcaagaagtttattattgaactttccagaaataacagcttccccaagttcatttgttaccacggaaatccagtaaggagacttcggtttcaaacgattgttattaacatctaggaatgctctaaacaatcgagggaaagaggttactcctactaatttactagcaaggtcatgcgcaataactttcttagtgaaacgctctgcattgaatgagtctagcgtatacaacaagaaataaaccccctgcaactgtgtgtttgacctaaaatctgttgaatcaataaacttttgatatgactgagcaaacttgacatattctttatagttacggaaacggaacgcaccatcacgtacaacatctgtttttcttcctgctgtactactataacctaacgcagtagaaatagtagaggacacccgtaatgccggatacgtagacatcaagttcaacagttgtttataactttggtatcctgattcggcatacttatggatgtagtcttcgaccttccatgatttacttgtactattcaattctgcaacatcaatgtcactgtcatcgaacgtataagtaatgggtaacccaagttcacgagctacagctaaacggtgttgtccgtcaataacttccatctttcgatttactttaatctcagtaagaaccccacgtttcgcaattgagtcccgtaaagccttagaaattttaactggtctgtttccttttagttgtttgaatttagacaggtctgctgtttcatagacctgttttactgctttatcttgcttcttttctttagacacctgtcatctctcccttaattattttttgtattgaatgctttgacttacctcagtgattttcttaacctttttaaatacattaggataacatttttccaaggtatttcggtctacaccaatgcgttcataggcgctaataagtttgaatgttccgtattgagagtcaacttttgttttcttaagttgaatcatttgttcaagaatttcttttctaagttcatctctttgctcgtttaaagaatcaagcaactcctgaacacgtttgtattccttaaagttgcgctctaattctttttcttttacttctgtagttgttagtctcatgaccatctctccctttctttactatactcaaagtatatcattacatattataaaagtcaacacctatcttacaaaaaattgccaaaaaaatatttggcaatcagtttttgtcatcaggttctaatagcttgtccgcaggcatatcaaaaatccgagctagtttagcttgattatttgctctgggttttttgattccatgctcccaataggatacggttgaccaatgtacacctagttttttagctacagaacgcaaggattcatgcttttcttcacgaacacgtttcagcaccaagggttttggcttgctttccacgattctcccctccattctatatataactacagccctaggaaaacctagggcaagtagattatttaagtgcttcttttacaaagtcgtattctggtttatttaacacagacaacatcatttcttctggggaagtaatttctccgcctaacacttgtgttaagatgtttgtggagaacccagatactaaagctgttcctttttcgtcaaaacgtacaggtgtattatcatgacgagagtttacattccagaatactacagatggtaactcgtaacctgcctgttcgaacttaagttttgcttgttcatagttagtgtaacctgccacaccttggtcaaattccatatcggaaataataacgatttttgaaggtaattcattttgtggtgtgtggtttttcaccgcagtagataaaatcaagtcgaatactttttgtaaatttgtatttctagcattgtatgaacatttatcataagccttcatcttatccataagtgtacctgacaatggtaaatttactaaacgaggttgttcagaaaatacgatgaaatgacctttgaatgcgccacttaagcgttccgcagtgtagatagccaagccttctgcaacttcccaaggggtaacattttctgtaccaccccatgtcatagaaccagaagtatccgcaactacaattgcattatcttcaatatctttcaacacatcgtccatagatttccatgttgcttccagtgaacggtctaatgttctgtagtaacttctgctaccataagcccgaattacttcatgaggtaacatgttctttgcattcatttttacttccccagattctactttagaaagtaaatcttcatattcgtctggcatgtgtaattgcaaagctttacggtatttgaacaatgctttagaggatacttggttcaaatcaatcttatggtattccttgcttgctaaccgaacttcaattacatttaaataatcacgtaatttagcaatcattttacgataacgagttagacctgctttaccttcaaaacctaaatagttagcaatacgagcaccttgattacgtttcttgctatttggagaacttacattagctaaccatttacctagtaatgatacaggcttaccttctgacatgtttttaatatcagatgttagttggttaccgatgatacgtgcaccttctgtatccacaaagtgaatactacgtttgtgtgcgtactccatagtttcaaataagtctgtccaacgaccaacatatgccatgtactccattaaagtaacgattacttgcttgttttggttgcgaccatccactaaatacttgattgcttctaggtaagcggaacgttcacccaatccacctaaacggatattacgtaagtgtaccaaattgcgtaatgctaactctgggttttcatcgtaagctttagcaaacatgtttcgtacatcttctaaacgaccacgcatagcccctgcttgtgcaaagaagtctaagttagcgtttaaagttgatgtataagttttagctccattttctgtagagccaacagttgtttcttcttttaggttgtctaaaaatgacatctgacatctctcctttgtatgatagtgttttatctaacaccactataacatgtaatattatgtaagtcaacactttttgtaaataaaaaactcatccgattaagaatgagtttgtatgtaatatcaagaaccacaggcttaattaaattcaatagttttaatttgttagctgattgctgtagggttctttatgctctggcaacctaagaggttagagctatggcaaaataccaaaacctttttaatatgtaacaagaatctattttatacgttgctctaccaactgagctacaggaggaatcatcctcccggcaggactcgaacctacgacccacggctccataggcaataaaaatcgctgttagattctttatgttccggcacccattaaggatggaactatagctatgctaaaaccgttttatttatgtatcaagaagcagttatgccaccaatcggcatcctcagaatttgggttgagaatataggagttgaacctaagtaagggtttgctgtatgcttctttatgcttcggcgcccattaagggtgaagctatgacctaagccaaaacctttttaatatgtaacaagaacgcattaactttaagctttaccaattaagctataccaccaagggtggcagttggattcgaaccaacaactcacatttttcagatgtattagttttaaaagtttgctgtggcgttctttatgttccggctacctgttaggttggaactatgacatatgtcaaaacctttttatcttgtctttataatagcataagctatttaaactgtcaagtattaatttaaatatattgaaacttatttaaaagctccaatatatttaacggtacctttgcatttacgtgcaaaagcttctagctctttacgagcacctaaacggtctggttgagaagactgtactgtaacttcttttggtacagtaatttcacgagttttcttaactatctttccgttttttaacttttgttcgtactcttctgtacgagtagaagttgttgaaataattccgtaaaatttagacatgttacgtgacctccggtcattttattttaatggggagtgatggagttgcaccacccgagctttcgcaactgatttacagtcagccccgctactacttacggtataactccccgtataagtatgtatatatcaatacaatgtgcaagaacttttagtgaggtagctctcatagtgtattaatggggtacattgtataacttcaactagtattgcctcacacgtgactaatcttatatacacaatgcctacatacaacccgatagaccacccttggtacgcatattaagaggcgcagggtgatacgaatatatggattgcaggattcgaacccgcaccctttggttggaagccaaagatactacccttatactaaatccacataatgttaataggcgggtacccgacagcgaagtatcattcctgtcttgtcattctcctattaactccataataccttgcctagagttgagctaggactcacaattaccgaaggtactaatcgggaaagcaggactcgaacctacgaccccacgctcccaaaacgtgtgcgctaccaactgcgctatttcccgttaacttatacatatattataacacaaacttacatgctgtcaacaactatttgtaagtttttttaatttatccattcgggacagtgtgctttaaccattcagccacccgcaggggtaacccgcaggacgggattcgaacccgtataccactgtcctattggataggcttgtgtacctgtcatcttccgattacacacgcctagtctagttaccgtaccaatagatttgacaggaatctagggtaacgcccaatatggtgttagttcacctcgtattctgttacaggtttgcaaccctgaacaaggatgaccaatcctaatggagcatagcggacttgaaccgctgacatctaccttgcaagggtagcgctctcccaactgagctaatgccccgtgtaaaacacctccgctgagattcgaactcagaatgcgggattagaaatcctgtggtttatccaattagcctacggagatataattgtttacagataaggtactcctgtaaacaattcaattgcttcaatttcagtatggaagttttcccattctaaacattcatagaaatcttgtaagatatgcttgtctttcctgtaaacagtctcacctttatggactttctcacagatttctctaacagcatccacattatatttaccaccagttttatactgttctaaaccagaatctagtaaaactcgttgtacttcttcactcttatctcctgctttccaagagtcaaaagctttatcatacaatgtatcttccatgttttcaccttctacttccatgattgattgaataaatctttgccacttagaaggctctttgtgtttacctttacgaaaactcattattagcctccattatctttaatgaaccgaggaggagggactcgaacccccaaacgcttttacacgtctacatgatttcaaatcacgctgaataccagttatgatactccccgaaaaagaaactgattgactagtactgttagttgactagtcaaccggaactacttaaaccgaactctttaaacagctttagtagtttatatttcaaatggaaggcatgggattcgaacccacacatgctgttacacatctacttggtttccaaccaagcctctttaccgtttgagtaaccttccgtcttgggagcaggcgggtttgtgtcaagtacacaatacctaatcttctgtgcatgttgttccctaggctttatgcacaccctactatctgcatactaacagacctgccaattttctaacactttttctaatgcttcgtatggacacattactgtcttaccgtgaacaccatgtattctcaaaataatataatgttcatttatctcagaggtaacaaagtatatcttgtctttcactaaacctaaacttccgtttaaaccaatgaattttaaatacatcatgttacctccttattatgtataacccatgaagcatcatggggggactgtagtatgcccaacctgcggggatgctccgctctgaatccgtagaaatcagccacaattatgtcactggcaaggatttgcaccttgcatgattagatttatccgatgggtcaaagccctacatacgaacttatacgttgttccaatgtctaatctcacgtacgagcgtttacctattccgccacagtgactatggagctgacgggaattgaacccgtgtcctaacgtagaaccatacaaaattctacgggcgtagttactagttttaatctacgttaaggctacaactaataactgaaattaccttaactgagtggtaaagcctctcctgagttatccacttttacctcagcgttgtcggttaatgaatcctctaggtagaaccgaccctaatctagaggggtgagtgtgtagctagtctaaaactaggctacagctaataattcttcgtttttagcagttatatttactgcgatgattaagtcatcactctgcccgctattcatatacttcttacgccagtcgaaaccaaaacagccccaacataagaatttcttttgactaaccctacccttccggcagggtctaatcaaaagtatacaattaaaaaatgaaaatgagttacggaaaatgtaacgtctccaccaccggactataagggtaagttgttccggtctttaacctaagcactttacttaaatctaacaggacagtcttcattacgtaaactacttaaccatgtaaaacgtaaaggtcaatttccgttgacctagtgcaagaggagggattcgaaccctcacgcccatcacaggcatggcattctaagtgccacatgtctaccaattccaacactctcgcataataacagccctacccaaccgctgttctgctagcatatagcttgcaggctttttatctgtgttataaaaaccagaaaggctatacgggtaacaggagtcgaacctgcatgtcacaaaggacaatggattttaagtccacagcgtataccaattccgccatacccgtataatcactttttaaactagattatttatgatttcccacttctgaaaaaaataccactttatatatcaacatttttcttatgaatgggttaagatatgttttaacgaaaaagaggctaaaagagtatttcctcaaaattttttgtcaagttaatctagtaaggaaaagtgtaaccttatgtgactgctcagaatcgaactgagattcatgtttccacagaacactgccttaccattaggctacagtcaccatcatgtgttccttacaagaattactatacagcatcttgtaaggaaagtcaacacttaaatgtaattttatttaaaaaagttttgatgaatctaattgagagaaactttcaggtagagaacctagctcttccatgtactcttggtcaatctcgtaaacagttaactccgttacttcattttcaatagtaagtttcattgcttctgctgtttgtatactgtgtccttctacttgaagcttatcatcaagataaatgccttcccagtctcctgcaactacataatctgctttcaagatattacctactttcttctcaatttctgataaaaattattatccttgtaatcttcctcgtgggcataaaattttttcatatcatatgtccaacaagtttcttctgctcgtttatgatgtgtcaatgttacttcgtcatcaaaacgaccttgatttaatttatgcctgtaatttctgttaaccattctttttatgtctcgaacagttgagtccttcatacaaacataacggtaatagggttttctgtaacttctactcattgtaagtcctccttaatagatacttacaatttagacaatactttcttcacaggaaccactccttattaataaaagctacctcccgaaaaacgtttcttcaccaaagtgtaagacgtaaactaacgacaggtcatagttttccaatcaaggcaaataccagtgagaggatttgaacctctgacacccgccttatcaagacgatgctctaaccaactgagctacactggtgtgacccatgtgtcaggactttcacctgttctcggggtgccccgcctctctactaatctcctcattcggtgcccctactagagtgactagagatagttagcaataaaaattatatatcatgaatcaaatttttactgcatcctatatacacgataccgtctacaggatttgaacctgtgacatccaccttgtaagggtggcgttctcccactgaactaagacggtgaaatatggaaccctaccagaggatttctttcggtattacagtcacctcggcatgaacaaagccagatattgaggtctggacttctcacgccccgggagtcgaacccagtatagacaaaccatattttatacggaagacaggattcgaacctgcgatataggagttttagtgcactcattatctcccacggtatccgctacgtattgccatcacgtcacttccgtatgttaaccgacagtaaaggaatcgaacctctatcactagattcgtagtctagcatcctatccaattgaacgaactgtcgctctaagctagcaattacgcagactgactatgggcaccttcgtcccgtcccctgtaagtgccctcctacaggttgtccgtggcaccgcaatgtactaaccgatgtccccacagggatttgaaccccgaaccccccgattaaaagtcgggtgctctagccgattgagctatgaagacagttgtgtttttcaagataaccctctcgaaaaaccgttactaatagaaaaactaagggtctcgactgacagatttgaactgcctgctcctcctaagaggcgtgttaccaaagccatacaccaactcttcgagaatatcccctacaggattcgaacctgtgaccccctgattaagagtcaggtgctaccaccaactgagctaaggagataagattaccaatagctagttaagccttacggaatcgaaccgccatgaggttatgaagctcacatagaccactagacacaaaactagcttattgataaaattctatatagataattgtatgcaatgttcgcactaactaaccagataaccagtcaatcattcaaaacattaatttgtgagttttcgctcacaatgctgattgagagaatcgaactcccattcccgggttacaaagccggagtaatagccgttatactaaatcagcgtaacccctcaatagaggggaattattatactaagttaccatacccgtaggtatttgtttgagcttgtttaaacataatgctcttgatagttaagtcgttgtacttttcatcgtcttcatcatcaaggtacacatcaacgttaacgttcttaccggaaataccgattgtttcgtctttaccaactgttaagtctttactgttgaaggatacatcaaagtagatgctatcttcttttgtacgactaccgaacgaaactctgtcaccaaataaatccaagcttcgagagttgattacaacaggttgtaacccaccttcaaattgaatagttactgtataatattgattttcaatattaaggatatttaagtcagcaatagcttctccaaatgggataccaaagcttaattccaatgcaattgctcgtaagcagtcatagtttaacttaattctacggctaaacttaacaacactgtcaatttcaccatagtaagcttcgtctaacttatcttgcaagtaagtgcgaatttcatctgcatcaggatattcgaaacgtaaatggtaatggaaacgtcccggacggttaagcataaagtcatttacacgacttaagctattaacagtaagagcgtagatacgtttacgttgtgataaaccatcgaataagctcaatagtttttcttgtggttcacgaccgtcacggtcattgaatactttttcaaattcatcgaacaggataagagactcttggtcaatactgtcaataaattctgcaatccccggataagcttctgtaattaagataacaggcatatcctcttcaatagctcgttgagataggatttgagtaaatagtgatttaccaatccctttgtctccacttaaaatgattcctaagctacgattaattgttttaaatgtgtgtagcactttttcaattttagctaaacggtcaccgtaaactttaggttctttcaattcaaaatcgtctgttactactaatgagaacccagacattggattgaatcgaactttataagtttgcgcaggcaacttatcataagttttaaggtcgtttgcataaatttcatagttactaccatagttgattactttcataaatattccccttattcgtgttttattagcatttgctaatggagaggggtggaattgaaccaccgacccctagggtttcaatctagtgctctaacctactgagctacctctccgtgtcaatttggacttatcccccacgtggttactaagataagtcctatgcctttgaagtgtggatactcaaaaaatgagtacaggtactaaaaatctgatgacaagtcagatttatgtcataagcagaaggtgagattcgaactcacgttcaggggtttgcaatccctagccttaacccacttggctactcccgcattggcatccctctaggtttttatctgcatcgggactcacataaactgataagtgaaaacagggcactagtctgctttacacctgcgctatcagaacctagactcggcaacactgccttagatgactttactcttgtaaacacgtcacattcttcaacaattaccagtagagtgctacataccagtaattcgttcctgtgaaggatagtacactataactatcaccgctgtccaagaatacacgccgtgaaggattcgaacccccgtcttccgggttggagccggaaatgatagccactacaccaacagcgcaagattcggaggggagggactagcaaccctccgaaaaatgtaagataatgagagattaaaacatgccactattaaaagtggaataggtaattaaggattcgaaccttacaagcccttactgcttaccttgtaaacttatagtatcatgtgttgtaccgaaagtcaacactttttataaaaataatagggagaaatatttctccctaaaaatggactataccggaattgaaccgatgacctgtcagttatgagctgacggctctgacctactgagctaatagtccgtgtaataataccacgaaataaaccttagtaagtcatatagtcccagaaagggagacatatgaaactagtgttgaatgccataatcgtttaataaatgtgactgagagagtaataaatttcttaggcatgtccatatgcctcctttccaataatgatagttttaagatataaacagaataaataaaagagaaaataataatgaataatagcgcatgagagagtcgaactctcgattccggttcgaaagaccggtgtcttgaccgcttgaccaatgcgccataaacgagctatatgggacttgaacccatgaccttctccgtgacagggagacgagcactcctgactgctccaatagcccaatgtttccccaaccaccgccacctaggggattcgtacgtctacgtgagttttttggttatacattattgttcaagacaataaatcgtacgagtggaataccaatctaccactctgcggtttctattgcggtaggtgggagtcgaacccactaaagcttggttatgagccaagtgcctaaaccgttcggcatctccgcagtaatacaagtctggttaaaaactcaaaacttaatagattaagggcttttcttcctgcttcatgtacactcactgcattcggtcacatactcagagaggctgaaccatcgggagctacccaatagcttctctctgcctttaatgtatggtctagcacggtggctaacaacgttcacctaaacattcagcattaaaagtattattttacatataacccatatgtcttctgtaatattttcatccaacgctgacttaagctacttgtaccaaggtctcttgttaaacctgtatttctacagttctcgtcaaagggagtcttttgagttttccaaggtctgccaagcttctcacacttccacctaacttggattcttttccacaggaacgtctattgtatcccccaagagtcttgtaccttacaatccatgtatactccacataacgcttaactgatattagcttttactaatagttactcctatgttaccataagacctacctgcgacccaaagcactatcgcaccttcggttacatccagactcacgccacgttatcctagcaagctgttcaaactttctgcactaggttcaaaatctattaagttttcaatttttaaccactaacttgtggtgtaatactaatatagcataacattacaaagttgtaaacacctttttgtaagtttttttgattttttttttgatggaaggtaagggggtcgaacccttacaccggatttctccgacctaactgattagcaatcagccctcttaaccatttgagtaaccttccgaaagcaaaaagggaacccctgtaattaaacaggggtaagagagatgtctctaaaagcctacaaccattataacatagaaacatagtttgtacagccttaactgtacaactgtcaggacagggttcgaacctgtatcgcaaccttcaaagggtcgtgtcctacctgttagacgacctgacaaaaaggtggaacctccctaaatttggggaagagggaggttctcatgctattaacaaacacgaatttgctaaccaagtaatcttgactagcaactcacctagcaggacttgaacctacaagaactggttaacagccagtcatgataccgtttcatcataggtgaattttagttctatcaacattataacacaaaagctgatagaactagcaactttttttacaaacttaacaacttttttcttaactactgattcagcaacttactcaatagttaaagacttaaagaaagaggaagtaattgaggtatgtcaatcactaactaaagtatacaacatttttatcatcctgacaacaactaaatacaaaaaagttcaaaaaagattataaatagttaaattatcagaatattcaaattaatgtcctattttaaatttttgacctccttatatacttaatactatatattaaatctatatatctaaattatataaatattagactatatattattaatatatataagacttgcaaaaaattaaaataggacatttttctgacaattaacttttagataaaaagaaagagagcaaaatgccctcttaccgtgtttcaaagtattccttgattgtatactctctagcttctttagcttcctcagtttcatctttaggagctaaatacaagtcagtaattgtagtaggtacctctaccatcttgtaatcaataaaagtagcttgacgtagatttaagtatcggatacctgttgttctatcagtacctgtatgaacaggcaagaaagttaattctttacctctgacagagccattagcttgtgttagtgcatcaactacagttccgcccatatagcgtggaaataggtaaaccttgtcagtacctactgtaatttctgcgaccttttcgtgtgttggatagttcacttataatttctcctttcagaatatgctataattacagtataagtataacacattctatggtttaaaaatgctgaacacgtaagtcacaaccgcaccgagaacaatcatgaagatgttttccacgatgtctcttttatggtcaaactctttgtcgtttacaccttcgagagcatcaatggtttcttccagttttgtaatctggtacgtaagatgtgaatatttctcttcatgaacagctaaccttttatcaagactgttaacgatgtccttcaattcactaactgcattattcagttctgtgttgtcctgtttaatgcccttctcagttagttctccatgttggagcttgtcttccaatcgttgcagtcttaatactaggtcacctacttggtaatcgttcatttgtgctccccctctcggttgtatagctcaatctcccggtcagttagaaaaccacatgtaaccgcctatgcccagaatacatccgacaaggtaaataattggagtatacagcccaatgaagagcataaccacgctaccaacactaagtccgtataatatcaaaagatacttatacgatgccaaaggacttaaatctgcttgcagttttttgtactgtatagctcgggtgacatagtaggatgctgagtaaacgaacaactgtagcaataacatagcaataaatgctagtcggtacattctatcgcctctcttctttcctagagctatctttaatatagtacaccaaagcctttataatcaggtgtgctagattaaatatgtaggctaaaaaatataaacggaagagtgagaaaaagtgaaggtacggaaaaaattattatacaaatcaatttttatcaccatctctgttatcatcatgatttgtgcaagcaagctgattgcagatatgctaggcttagaacaacactttacaacaacaatgcttgtaggaggttctttgtgggcttggatagctagtattgtctttgattcttatgagaagaggaaaaagaaagataatctacagcaacagcttcatgaagcactgcgtgatttaaaagagataaaagcgttaatcaaaaaataattaataaggggtggaggatatgtcccttacaagagaagaaataaagcaaaaaaggcagtatatttttagcaaagctcaaaagacgacaaatatacgaaaaggggataaacgcatagcaagtgctacacgaatgtgtgcagtatgtggaagaccgttgtctagacttgttcttactaatggttctgcaatagttactacagcacatgtaagctgtaagatgtcagatttagtacgattgaacatgtgcgaagacatacggtcttgctatgcgtatacaagtaaaaagggggaggaatagccacatgagtatggcagaccgtattaaagaaaatgctgaacaaaagaaaatggaacgtacatccgaacaacgattacgtgacacatttaataacgcttctctcacgttaattaaccagttcatggctaaagtcatggcaggttcaatagatatagatgacgttggggatttaacccgtctattccaaatctacatgcagattaataatatcaatgcaggaatgcaagagggaactggtcaattacctgctcttagtgctacgcaaaaagatattattgcagacaaggtaagcactgaaaaggctaccatagacggagaggaggaggaagttgtttcgttggaggaattagctaaattatcggatgaagaaattgataagatgctattggataaggaaatccaaatgaataaagaaaacgaagcaacattttaatgacaaataaagcacaacatattgctaaaatggcaaaagaaatgtatgggacggacaaaataacaactgcacagcttgcctacatcacagacatgttaactccgtccacatatttactaagaaaccactccgttcgtaatcatccgattacatttatgatttccggacgtgaccaacaaaaagcccaagcgcatagaccttggcaagtaaaaattattaatgaccaacatcgaacaaaggcagttattaaatcacggcaattagggctttcagaaatgggtgtaggaaccatgttacactttgcagacacacatagttatgatgcagttaagtgtttgtataccttcccaacaaacgaacaaatgactaaattcgtacaaacacgtcttgaccccgtattgcaacgtggttactacagtacgattattgacccagaagtagactcattaaaagctaagaagattcgtaatagctttctatatttccgttcaagttctaaaccgggagctgtagaaggggtcgatattgattacctatctatggatgagtacgaccgtgttcctgcattagcagaagcttctgcattggaatctatgtcatcttctccatataagattgttactcgttggtctactccatcagctcctgatgtaggtatccatgctttgtttgaacagtctgaccaatactggtatctacacaaatgtgataagtgtaatcattataaccaaatgaactatgaagactatgtaccggaggcaccagtggaacgtagagggaacatcctttgtgtaaatcctaaaggggtagacccaattgctaaaacagttgtggatggctccttccaattcgtttgtcaaaaatgtggagagccattagaccgttggtacaatggtatatgggttcctaaatatccagaccgtactaaaaatggtctaggtattcgaggatacatgatttctcaaatgaatgctgtttgggtatctgctgaccaattaaaaacaaaagagctaacatcactatcgaaacaagcgttctataactatacgttgggttacccttatgctgaccaaaaacttactgttaatgccggtgacgtagaacgtaatagacgtggagacctcccagagtcccctagagaccgtggagactacaagtttatctctgtaggtattgactggggaaacagacactgggtgtccattcatggcgttagaacgaatggtcaagtagatttaattaaattgttctctgtaggtaaagctaacccattaaaccctgatgcgattgatacagatattcagtcaattcgattacaattagcaccatatgaacctgatattatcgttgccgatgttggtgactctggtgataaagttgctaaactgattcagatttatggcaaagaccgtgtatttggttgtgtatatccatctacacctaaatctacaggtaacttagtaccaagttggaatgttcaaggtaacaaggtatctgctgataagctaatgcagaataaacgatacatttcaaacatgaaagatggagttattggtttctaccacaaaatggatagtgaactaatgctttacattgaacactggggaaatgtagtaattcgtgatgaggaggatgaaaaatcccctacaggattccgacaaaccatcggacgtaaaggtgatgaccactattcacaagctagtgtttattccatgttaggttatgaacatttgatgaacgtatttacaggggcagatgactacgggtttaactctgattggatttctactcaattgaaccctacacctcctgatatttttactcagtttacttaaaaaagcaaaatgtcctattttaatttttctacgtccttatatattaatactgtatatctatatacctatatctagttattaagtatatatagtataatatattatataagggagacaaaaatttaaaataggacatttttatcaaattagctattgattgacaaaaaataatatgctattatactacttgtcaataatagcactagttatttttcttgtcataacaataaaggagacgtttacatgaatgacaatcaagaataccaagctcttgttgataatcttcttagctctgtaccagaatttaaacctgtagaagctacagtcagtaagtcctttttagaaggtatgctaggcaagaagttagactacgggtacgttatatcagaaaatgaaaaattatcaaaagactattcacatattgtgaaggcttatggttttaactccttttatgacctatactgctatgctgatagttgtgattcactaaatgactatttaattaaaggcggtcaaaaagatttatcaaagttgaagccagttaaaagacgagtaatgagaaatggtaaaatgatgactactactatctacgaagacagttccggagaagatgatgataaaaacccattagataaggacactcaaacagaggaaaatgttgagccaagaaatgctagagatttaagcaaaacaattattggagatgaccataatggtatagacccaaaacaaattgctaaacttaaaactgaggcaggtaatttaaatgggacattttcaactgattgttcttcatacttagttctccaaggagaaaccggagaacttggtggtgtggcaggttatcgtaaagagggtagctatttatatttagctttctaccaatcagacgaccttacaagtggagtggcttatgtagcatttacacaactattgttacgtgctcgtaaacttggcttaggtgctaagattgatgctactgatgacccgttagcactagaattatttaaagaatacggacttaaaaaaagtggtagttgttatataatttccaagagttccctactggaagcgcttggggagccatgatttcaacttttgagttatttttaattttagccttctcaacaaccgtgtttatatgctataatctttttgtagctcaaacagtcaagacaatttttgatttgagaaaaaaggcacaagttgtgctaactgaaagagcaactgagctaacgaagaagttaacaaacatattgaaaggggatgtacaggagttgccagataaagaaaacgtaattattaacgaacaaacactctctgacttgttagtcgaaaaagcaagcgatgccgactacaaattgttcattgagaaactgacagagattgtaaaggatttatattcaaattatcaatttcttcgtcaagacccacaacccgatgatttcatgtcaggttattttttagggttccaagtttttagagaggaataccctgtcgaatacgagtatttattccgattagctattgaccgtgggttagacgatattaaaatcaataaactctttgtcgaagctttacaaaacggagaggtattaccattaggggatgccattgtagaccctaacttgtccgggtgcagttctatccttcaagcacaagaagtacgtgtaaacattgtattcgcacctaaagcatacatggagcgtaaagaagagctgattgaagaaaaaactgctgaaatggaaaagcagaagaaagagcaacaagaactagcaatccaaaaagataacgtggttaaatctgcacgtcttgctgaggctgtcattaacgaattagtggatgaagtcgcagaaaaacacgaactacaagaactcgttaaacaaattaaagaaagcatgaggtatttctaaatggcaaaccctacaaccaaagtaacattaaaccaagcattaatcaaagaattgcgtgcacttcaaggaaaaagagagtccttgattgcaagtaatctacatgtaccagaacctcagtcagttatgattccaattcctaatgttttagtaacagatggtgacaaagaggtactaaaatttattaaaaacatcggtttaattagagctgataaatcttttgggttagatgtggcaattgaagcaggagaaaaagtaacccttacagatggacgttcttccactatcttggaatgtattttctattacacaggagatacaaaaattgatgaaattgagcaattcttagaacaaaactaatatttcctgattaaaaagaagctttttttacttgtgctatattaacactgcacaggaaaagagagcttctttttttgtgacttttttataggaggttgcaagatggcaggagaagtatttagtagtttgattacaagtgttaaccctaatttgatgaacgcaggtagtcgtaacggtattgctattgaccgaattattctacatcacaacgcaacaacaaataaagatgttgctatgaacacatggttattaggtggtagcgcaggtacatctgctcactatgaatgtacaccaacagagattattggatgtgtcggtgaacagtactcagcattccatgccggaggaactggtggcgcagatattcctaagatttctaaccctaaccaacgttcaatcggtattgaaaatgtaaattcaagcggtgctcctaactggtcaatagaccctcgtacagttacaaattgtgctcgattagtggcagatatttgtaaacgttatgggattccatgtgaccgacaacatgtcttaggacataacgaagtgactgcaacagcatgtcccggaggaatgaatgtagacgaagtagtacgtcaagcaaaacagtttatggcaggtggaaacagcagtacagctacagccactcgtcaagcattcttcgatgttgtgaacgtaaactctggtgcattcaacgtgcaaggatggttcatccctagcaagtctacaaaaggacaatctatttggttgtactttatggacaagaaaacgaataaagaaattgctcgtttccaaggtaaacgtgtagttcgtgaagacgttaagaaagtatatccatctaaccctaacggagcagatgttggttttaacgttgatggtgcaactccacaaagtcttatgggcaaagactactacttcttgttacgttacaacaacgataacaaagaagaacttttcgtaacagataaagtctttaaagcacctgcactagttaaccgtggttgcctagacgtaattagaggtgacaaaggtcaggttactttacatggatggcatttatcttccaaacgtagaaactctgacaaacacttcttgttcatcatggataagaagacgaataaagagattgtgcgttttgacgttacaaaatcttcattcaaagcttccccagatattcaaaaattgtatgacggtacaattgcacaacgaactaattgtagatttgcttttgctcatgcactggatgctaaatcccctgcacgtggtaaagacatctatattttaagtcgttactgctctgaccctgcggggaacaacgggatttccgaccagttacaacttggtggaactcacaaattgtaacattacattgacctaccttctggtgggtcttttttattactgtaatataatgtaaatgaactgtaatactataggactaactttgtaacactaatttgctatattagttcctgtaagcaacacataaaactaaaacaacccaaaggagaacgacaacttgaagaaaacgacaattgcaacattaggacttttaggactaggactatcattaggattgggagctaaagctcacgcagacgaaatccaagaaaatggacaaacttactggcaagtagaatccggagatacattatcagctattggtaatcgttacggaattgattttaacttaattcaccaagcaaactcagacaaagtttcagatgctaacttgatttatgttggagacaaactattattaccattaaacggtgaagttcaagctcctgtagctcaaccagtgcaagaagcaccagttgtagaacaagcgcttgtagtagaagaaacacctgtagttgaacaggcaccagttgttcaagaaccagtagaacaagctcctgccgttacatctaactcagcaaaagaatggattgcacaaaaagaatctagcggttcttactcagcaactaacggacgttacattggacgttaccaattagatgcttcatacttaaacggtgactactcaccagagaaccaagaacgtgtagcagatgcttatgttgcaggacgttatggttcatgggaaaatgcacaagctttctggttagctaacggttggtactaaaataataaatactaacagattaaaaaaagactctctttttagggggtctttttcttatgctatattataactgtaacttaaaaacaaacaggaagtgatagctatgagtaacattaacatggaaaccgcaattgcgaacatgtacgctctaaaagcacgaggtattacttactcaatgaactactcccgaacaggtgcagatggcacaggggattgctctggtactgtctatgattctttacgtaaggcaggggctagtgatgcaggttgggtacttaatacagatagtatgcacagttggctagaaaaaaatggttttaaactgattgcacaaaatcaggaatggtcagctaaacgtggagatattgttatctttggtaaaaaaggtgcaagtggtggttccgcaggtcacgtggttatcttcattagtagtacacagattattcactgtacatggaaatcagcaacggctaacggtgtttacgtagataacgaagcaactacttgtccatatagcatgggttggtatgtgtatcgtttaaatggtggaagcactcctccaaaaccaaacactaagaaagtaaaagtacttaaacacgctaccaactggtctccatcaagtaagggtgcaaaaatggcaagttttgtcaaaggcggtacatttgaagttaaacaacaacgaccaatttcttattcttactctaaccaagaatacttgattgtaaataaaggaacagtacttggatgggttctttcccaagatattgaaggtggatatggttcagatagagttgggggaagcaaacctaaactacctgccggatttacgaaggaagaagctacgtttattaatggtaatgctcctattactactcgtaagaataaaccaagcttatcttctccaacagctacaccattgtatccgggacaatctgtaagataccttggttggaagtctgctgagggatacatctggatttatgcaacagatggacgttacatccctgtacgacctgtaggtaaggaagcatggggtacattcaagtaacatgacttaagagggctatttagccctcttttttgtgctatattaaattagtagacagtgatgaaaaattgttacagggctacctgtggtatacttaaactagtacaaatgcttgggaggtaagaatacgtggcatacttacaggacgatacatggcaagcagtaaaacagttagctaaacaaaacggttttgtaggagactggattctaattattcacctctactatgaaaacggtggaaacaatgtacaagttcatactgctatagataataaaaattaccgcatactacgaatcttagataacaaacaggttttattagttgatagagaaggaaacgttgctgtagaggactatgaagtagtcaatgacagtcagaaaggtttcttttatagtgatatgcacaaagtcgaactaacacttccggaaggttgtagcttcaacggtaaacaaagaataaaaatttatatatgaggtaggtgtaatcaagttgccaaaatggttagataaagtgttgggtgtagaagaagatactgacatcgttaaaagcgaagaagtctaccaaaccttgcttaaagaaattcaagcacagccgttaacagaaacggtagagaaaggtatgaatggtaaaccagtagcatacatgcaacctataattggtgacatgtcagtaaaccccggatttaagacaaaaccttctattagaaattctcaggatttacacaaaatgttgaagaagtttggtaataatatcattcttaattcaattattaatacacggtcaaatcaggtatctatgtattgtaaacctgcaagaaactctgagacaggtgtaggttacgaggttcggctgaaagatattgaacaagagccatccacacatgacattgcaaatattaaaagaattgaaagctttttagaaaataccgcagtattcaaagaccaaaatagggacaattttactgctttttgtaagaagatggtacgtgcaacttatatgtatgaccaagttaactttgagaaggtattcgataaagacggaaattttatcaaatttgataccgtagaccccacaacaatcttcttagctactaacggtaaaggaaagattattgaaaagggagaacgatttgtacaagtactagacaatcgaatcgtagccaaatttaatgaacgtgaaatggcttttgctgttcgtaacccacgtgctgatattgaagtaggtcagtacggttatccagaactagagattgccttgaagcagtttattgcacatgaaaacaccgagacgtttaatgaccgattcttctctcacggaggaacaacacgtggtatcttacatgttaaagcaggacaacaacaaagtcagcaagcattagatattttccgtagagaatggagaagttccctatcaggtattaatggttcatggcaaatcccagtagtatccgcagaagacgttaagttcgttaacatgacaccatctgctaatgatatgcagtttgaaaaatggttgaactatttaatcaatgtaatttctgcgttgtatgggattgaccctgctgaaattaacttcccgaataatgggggagcaactggttctaaaggtggttctttaaacgagggtaactcaaaagagaaaatgcaagcttcccaaaataaagggttacaaccattattacgctttattgaagacactgtaaatactttcattattgctgagtttggagacaagtatcaattccaatttagaggtggagacctaagtgctcaattagacaagattaagattcttgaagcagaagttaaagtgtttaaaacagttaatgaagcacgtgctgaaaaagggttggaaccaattaaaggtggagacgtaatcttagacggtgttctaattcaatccattggtcagttaatgcaacaagaacaatttaactatcaaaaacaacaggataagcttaataggctcttagagctttctggtggcgaagcagatgattctaatggaattagcttccaagacaaacaacagggcttagatggaacctcagctagcgtaaatggcaaaggagagtcatctgttggtaaagatggacaaattaaaggtaagggcataactaacaccaattctgctaaacaaggtatgaaaggtgacaaacctaacgactggcaaaaataaatagaggggtaacaccctctatttacaattgtccaactgtttagtggtagttctgctatattaaaaacagatgtaagtttaggtggtgaatgaacaaagatgcaagagaagtataatattttcgttcccattgacgtagcaggttccgtagagaaatctgaacaggcaaacgatggtgaatggtacgtacagggttatgctacaacgcctgaccttgacttgcaaggagacattattttaccacagggaattgacatttcttactttgttactaaagggtgggtaaactacgaacataaacaagatgcagaatacattattggtgtaccaactgacaactgttatgtagaccttaataaaggtttgttcgtggaagctaaacttatgaaagaaagcaagtatgctcaatcaatgtggcagttagctaataccattcaaaaatcaggaatctcacgtcagttaggtttctcaattgaaggggcagttacaagtcgaaatgcaagagacaatcgtattattgagggtgtggctatcagaaacgtagcattaactacacatcctgctaacccacaagctacgtgggaaacacttgttaagtcttggacaacagggtatggaattactcctgagacacagacagatgcaggagcattacgtagagagatgtttaaagaagacatcacaaatctaacatatgcagtgaagacagtagctaagttgtatggtaaaaaacccgaagataaagagtttatattacgtgaagttgctaagagttttgaccaagaaacctctgaaccagagttaagtgcatttatgttacaattaactagaggggtttccttacaggaagctaacaacttcattgaaagtagaaaggagctaaaatagtgtctaaaacaattaatgacattatcgaagatttcgattcaaaagtgaatgtacaggaagtatctaaatctattgaagatgaaaatgtagagcctgtacaggaagaacaaattgaaacaccagaagctgttgaagaaggtgtagaaaatgacaagccggaagaacagcctgttgaagctgaggaagttaaagaggatgttgaatcagaatccgaacctattgaatcagatgaaaaaccagaaacagaatccgaagtcgcagaagaagctactgaaccagaagtggaaaaagtagaaaaatctgataaagaatccgataaagaagatgaggaaaaaaaatcttctgatgatgaggacgacaaagaggataaaaaggataagaaaaataaaaaagctgacaaagaagataaagatgaaaaagataaagacaaagaagatgttaaaaaatctgatgagtccgaagacgtagaaaacgttgaaaaatctgctatctcttcccaagatattgtcggtggattcgaagttgtattcaaaaatatggcaaacctttttgaaactcaaaaatctttaactgatactattgcagaattaaaatctgaaatcgtaagcttacgtgaatctcacacacaagctatcacaatgaatacggaagatgttaacaaatctattcttgtagataaagttgatggagtatcagtagaaggtaaagcagtaggatttgtttctaaatctgtagatgtagaagcagatgtgacttctgaacaagaagacgttgttgaagtagtagtagaaggtgccgaacaagaagaagctccggctaaatctgatgaagaacaattgtttgacagtgttcgtggaatccgtgatgacttaatgagcacatatactcgtgttgcaagtaacggacaagcccctcgtggtgagttagaagaaattcgtcaattgtggggacgtattaaatcccaagacgaactagctcgtgcacaagcattcattgataaatacaaataaatttactaaaaggtaaatttttttaaggtgtactgctatattatagtcagaaccaatgagagacctgacatttcccccctgaacctccacagggtcaggtctcatctttgagaggaataaaaatgaaaggtgatttatatataatgccagaagacaaaaaacaagaagctaaattaaatcccgttcaggaacaagtaatcaaaggatttacaactggttatggtattactcctgacacgcaaactgatgcggcggctttaagacgagaatttctagatgaccaaattactatgcttacatgggcagaaggagatttgtcattctatcgtgacatcacaaaacgccctgctacatctacagtagctaaatatgacgtatacctagcacacggtaaagtaggacatacacgtttcgttcgtgaaatcggtgtagctccaatttctgacccaagcttacgtcaaaaaactgttaacatgaaatacgtttctgatactaagaacatgagtatcgcaactggtttagttaacaacattgaagacccaatgcaaatcttaacagacgatgctatctctgttgttgctaaaacaatcgaatgggcttctttctatggagatgctgacttatctgaaaacccagataaagattccggtttagaatttgacggtttagttaaattgattgaccaacataacgttattgatgctaaaggtgaaagcttaacagaagcattgcttaaccaagcttccgtattaatcggtaaaggttatggtactccaactgatgcttacatgccaatcggtgtacaagctgacttcgtgaaccaacaacttgacaaacaagttcaagttatccgtgacaacggtcaaaatgtaacaatgggattcaacgttcaaggtttcaactctgcacgtggtttcattaaattacatggttcaacagtaatggaattagaacaaatcttggatgaataccaaatggttagtcctaatgctccacaaaaagctactgttcaagcaactgtagaaactggcaagaaaggtacattccgtccagaagacattgctactcctgctgagtacaaagtagttgtagtgtctgacgatgcagaatctgctccatctgacgtggctactgctacaattgctaacgctactgacggtgttaaattagcaatcactatcaacagcatgtaccaagctcgtcctcaatacgtagctatctaccgtaaaggacatcaaacaggattgttctaccaaatcgcacgtgtacctgcaagtaaagcagaaaacaacgtaatcactttctacgatttgaaccaacaaatccctgaaactgctgacgtattcgtaggtgaattgactccatctgtagttcacttgttcgaattactaccaatgatgcgtttaccattagctcaaatgaacgcttctgtaacattcgcagttctatggtatggcgctttagctcttcgtgcacctaagaaatgggcacgaatcaagaacgttaaatacattccatctggaaacgtaattaacgaacgctaatcttagttaaactaagaaaaattgaatagaaaacggaatagggaacggtctgactgttccctatttttattataacgaattaaatggaggaatacaaatgttaaaatctacagtattacaaaataaaaaagtggcaacatcttttggagaagctgaatttaaccatttaggagaaagtcataacttgccagaggaacatcaaaaagctttagctgaaaaggtgccttacttgacacacattcctgataagaaagaaaaacctaaagaggaaaaagaagtaaaagaagaaaaaccaaaagctaaaaaagcacctgctaaagctaaaacagccaaaaaagataaagagtaggaggtcatcatatgtacccagattacggttatggtgatggtggaaaccaagatgtataccaaccatatgcacatggtaacccaaaacatattgacattgcagacctagataagattactcctgctgattacggttggactcccgacacgttaaaggcttatatgtttggggtagctgtagttaaccctgaaacaggtgaaccattaggagatacattctatgagcatgtaattgacacagcaattgctaaagctgaaaagaaactggatattgcgattttacctcgtttaattcaaggggaacatcacgatttccaccaatctgactttaactcttacttatacacgcatgtatttaaacgaccactaattcaagctgaaaagctacaattagaaattaatggacgaggaatctaccgttaccctgcaaactggtggaaagtatataccctagcggggcatatccaaatgtacccaacagcaatgatgcaaacaggtacacaatttgcctatgattttgcattctctggctacccacaattagcaggtatgccaccttcatctggtcaagtagatgctccacaaatgattcatattgactacgtagcgggtatgttacctcgtaagaatcgtggatacaacgctgagtgggagtgccctgctgatttagagcaattagtaatcaaatatgctattaaggaaatcttccaacaatggggacgtttgattattggtgccggtattgcaggaaaatccttgtcaattgacggtgtaacggaaagtatacaaacaacacaatctgctatgtatggtggtgcatctgccgacattaaacagattgacgaagatattgatagactagaacgtgacctagcttcctacttcggaatgaacctaggaattatttaaggagggatgactcatggctaatgaaccaacacgtttcagcagttcaggttctacaggtaaccctaagcaatacatgaatgtaagtagactagagtttgaaacaaaaggtatggatacctttgtaatgaaccgtggtataaacattctgtgggaacgagcttggctttgtacatgccgaaatccgatgactcttgctcctgactctaattgccctatttgtaggggtagaggtattgcatatcaacctgctgttaaggatataatgattattcaaagtcaagaaaaaggtgtatcaaaccaagatttggggttgttcgattctggtacagctattggtacaactccaattgactctaaaattactttccgagacagaattactgtcccagatgtggaaatataccaaagtttcatttttaatgtaaatagccgtagactagagacaggtatgtttttaagctatgatgttaaacggctagaggatgtgtatggtgacaaagggcaagtccttgtggagggtaaagactttacgatggactatagcacgaatactttttatcctaaacaacatttgttaaacacgaacatctctatcaacatggcagtaacattacgttatctggttattgatttactcaaagaaagtcgttaccagtatacgaaatttggtgtaaaagaaccactgtttgagaaccttcctagaaagctcctattgaagcgtgaggacatctttgttgatagtgaaccctttgtattagaagtagatacgaagtctcgtctagaggcactagagaaggaaaaagaagtaacagaatctaagatggtagaccctaaacgtacaggttcgagtgcgggaggattctttggaggtaaactaaatggctaagaaaggacaacgacctgcactgttcaccagtcctaaagaaatgttaggtaatctgacacgagcaatggtagatgagattctatctgatgcacaagaccaagcgttacgtgcaggtgccgatgtccaaagaatgcctaattatttacaggtaacagaatcaagaatggctaagagcggtgtaattgatttaaaaccgttcttcgctcgttctagtaagaagaagtacaacaaaaaaggtgaatggtacttatatattcctattcaaattaagacaagaaagatgtctagaagattgtatgacgatttaaggtcttttcctacaaatggtcgtcccgtaacagttaagatggactatctttatgatagaagaaaacaaagtcctgctgtacaaagtatcaactatagccctaagtccaaaaatgttacaattataccaagagagtggggagaaggtacacggaatacgtatgttacattccgtacagtaaatgccaattctccggctaacagttggataatcaaccgtagtaaagtgaactcggacgatatgagtaaaacaatgttagctaacatcgacaggttaatgaagtggaaattgaagaatttaggagggtaaaagatgataccaagtttagacacttacttgtataaagaatttgaagaaagactgagaattatcttagaagagtgctatattatagacgaagctttgaaggagatagattcccaagctttagagacatttaaaaatacttattgttcaattgacggtaaggctccaaagaaagaaatcgaaatgtcgtattctttcccacaggagaagcagaattttaatgctcgttatgtgattacactaggtgggagtgatgaggagaataagtcaatgggtggtgtacagggaggctatacttaccgagaaggtgatatagttaatgaagctgttcaacttgtccgtaatggaaaagatttaattatgaacacaacaaagcctgtagctgattttttgaatagcccagacattagtttttcagaaagcgaccatttcagaatcgaaaacaacaagcctgtatttgattattccggtaatgaacacttagaaggtaaatcttttaatattgtttatactgtgaaagagtctgatgaggatgtagcaggtgtttacaaagggtaccaatcctccgataccgtaaacattgtcggaattagtacaaatatggacactgcccgctgtctagatgccatcgcaagactaattcttattacgatgcgtgacagcttagatgagaaaacaggatacatgctacagacattacactttggagacatgcaacctgtaattgaatcaggtgagacagtagtatttggtagaccttgtacaatcgggtataaagtgactaattctattagttttgatttaaaccgacaaatacgagaaattattaccaaaaggaggatgaaagcctaatggcaaaagaaacaacaaagactaaacaagagagtccaaaggaacaacctaaaaaggttccaaagcctaaagggtacgttcatgtagatacatttttgggctatgcacaagtactttacggattgagtaagtatcaagtagcaggcttcaaagcattcatggcagggagagagtatcagcacgatgatgccgactttgttccgtttttggaaaagtatataggaaaggaagttaaataataaatggctgtagaacaattcccaagaaaaaaagtgtcccgtccacatactgaaattactgtagatacttctggtatcggtggtgcatctaacagttctgaaaaaacattaatgttagtaggttctgctaaaggtggtaaaccaaatacagtttatcgtttccgtaactaccaacaagctaaagctacattacgtagtggtgagctattggatgctattgaattagcatggaacgcttctgatgtgaacactgcatccgcaggtgacattttagcattgcgtgtagaaaatgctactaacgcaacaatcaaaaaaggtggtttaaccatcgcatctactatttatggtttagatgcaaacgaaatgcaagttgctttggaagacaatagtttaacaaatactaaacgtctgacaattgcatttgcaaaagacggatacaacaaagtattcgataacttaggtaaaatcttctctatcaagtataaaggagaacaagcacaagcttccttctctattacagaagataatgttactaagaaagcaaacaaacttattttaagtgcgggtgctgaggttgaagaccaaactcctgtaatggaatatagcttaggacaaggtgtttactctgatacaaacgtattagtaagtgcaatcaacagtttacctgactgggaagctaaactattccctattggagacaaaaatgtgcctactgaaacatttgataaagtagaaaaagctgatgttaaaacaggtgagaaatatgttgaagctctaggcggagacattgctaaacaattggaatataacgactacgtaacagtagaaattgaccgtgcaactccaattcaagactttgcgttaactaacctttctggtggtacagatggaacaatcccagaatcttgggctgacaaattccctctactagctaatgaaggtggttactacttagtaccattgacagacaaacaagctgtccattcagaagctttagcattcgttaaagaccgtacagacaatggagaccctatgcgtatcgttgttggtggtggaacgaatgaaacagttgaagaaagcattgcacgtgctacaaacttacgtgacccaagagcttctgtagtaggattctccggaactcgtaaaatggatgacggacgtttgcttaaattaccgggctacatgatggcttcacaaattgcaggtattgcaagtgggcttgaaatcggtgaagcaattacgtttaaacacttcacagtaacaagtgtagaccgtatctacgaaagtggtcagttagacatgcttaacgaaagtggtgttatcgctgttgagtatgtacgtaaccgtaccttaactgcattccgtatcgttcaagatgttacaacttataacgataaaacagacccagttaagaacgaaatgtctgtaggtgaagcaaacgacttcttagtatccgaattgaagattgaattagataacaacttcattggaactaaagttgtagatacaagcgcaagcttgattaaaaacttcatccaatcattcctagataagaaaaaacgtgctcgtgaaatccaagattacacaccagaagaagtacaagttgttcttgaaggggatgtagcatctatcagcatgactgtaatgccaatccgtagcttgaacaagattactgtacaactagtgtacaaacaacaaatcttgacagcataacaggtcgggggcttttagccccctataccttactaaaaataatctaaaataggagtgaaacatagatggctagcgttggaaatcaaacagtccacacaggtaacacagtttacttgatgattggtaacaaaattatcggacgtgcacaatctgcatctggtgaacgtcaatatggtacacaaggtgtatacgaaatcggtagtattatgccacaagaacacgtatacttgaaatatgaaggtacaatcaaccttgaacgtatgcgtatgaagaaagaagacttagcaagcttaggtattactgctctaggtgaagatattcttcaacgtgacattatcgacatcgtaatgatggataacttgactaaagaaatcgttgttgcttaccgtggatgctctgctgtatcttacagtgaatcattcacagctaacgaaatcactagtgagtccactcagttcacgtacctaacatcagctaaagttaagtaagtagtgtaaaatagaccctaaaaaatggggtctatttttttagttttggtattgacaaattatacatgtatctatataataggtattgtagttggtatacattttcgaacttaatctttcttatctttatcttacacatgacctagcaggagtgctaggtctattttttttgctctcatagaggcaactaactagtgtgctataataagtatagaatgctatattaacttatgaaagacataggaggaataagtaatgactgaaaaagaaaacaaggttgatttccctcagcttaacatgactcgtgaacagcttatcgaaaagattaaccgtggggaaaatctaacagacgaagaaattaatttgttaaaatatcataatgcagaagcagagcataaagaacttaaccgaattattccgggagttaacaatgtattctcaaaacattatgatttaaaagagtttggtatggaatttgatattaaaattaaagcaccaaacgtggtacaacaaggtaaaattcaagcaatgcgtgaggcttacttagaaggtatgggtatggcagtaagtaactttattttccaatgctatcatacactagctactatccgtgtttgtggtgtagaagtacctaaagagctagaaaaagatgaagacatctataacatctacgtcttaaacattatcgggaaggattttgcggagtggttaaactcctttcgctactaatctcgaaagtttaggaggtataaaaaccctcgtcagaaatacatatagccgaaacatgtgggctattatgaaaaaatttaatgtattacctagtgaccctgcatggcaaaatctaactcatgagcaagtagaatggattttgtataacatggaaagagatgttgaagaagaacaacgcagagctaaaggtcttgctcttgaaggtgaatacgaagacttggatgcttcttggtatgatgtacctcatgaagagtttaaccctgtacgtgaaggtcatgatgaagctgagattgctcgtaagcttaatgaaatcactacagaagaggacatggctaaacttaaagctcgttgggaagctagtcaggaagtcgatgcaatccgtgccgaaggtggtacaacgattgaggaagacacaatcaatgaacttattgctaacaatgtacagaaagctattgaagaagctaaacgtattgagaaacatggtggtaataagtggggagacaaaaccccaattgaattagaggaagagcgtaagaatctagaatttaaatctcagcttaagcaagatgatattcaagatgcaattgctctgttcaatggagaaaaagatattgaaccaacatcagtagacgatgattttgtaatataggagggtagggttttaccctaccttttctttgtaaaggaagtgtggaaatggctaacaactatcggttttacgttgatgcaatgactggggatgccattgcaaaattagaagaagttaataagttgatggataaaattgactctaagagtgcaaaaggtacccagaagtttttccatacaactcaaagagaaatagacgaagcagtagccgatatgcaacgtttaattcgaatgaaaaaggaactagataagaacttcgaaaaacaaagttctatggcagaagctacaggtagcatgacagattttaaacgtgcacgtgcaaacctagaacagttacaaagtgagttccaaaaaacacaaaacgagttccaaaagttagcaagcatgaaagctaacccgaactttacgaataaaacagctttgaaagaacaaagagcttacagagaagaattgaccgagcaggaaaaagctttacaagcaatcaagaaagctcaacaagaattaaatcgagtaaactctcgtgtaaatcatagagcacaccaagctacctctacaggtagaatgacctacaatcaatctgaaagtatgaagaaggatttaggtggtgttgggctatactcagatacacaacgtgaaaataaagaacgacaagcacaattaagagaccaataccgtagaagacaagaggaactatcacaagttcgttctgatacaaacttagatagacaggttcgtaagaatagagaaacatctatcttagaagaaatcaaaggtatcgaacaagagattgaagctcgtaagaaatttaatcagactttgaatgatactattgagaacttaaagtcaaaaacggaacagttaaacaatagtaacgttaaagtagaggcggataggaactccactgcgggcgttatagcttctcgtgccccatctatagccatcgcaggtttaggctctgctgtggcggcaataggtggcttatacgctaagggagctactgcgaatgcaggtatgcgttattcaaccatctctttaggacaacgtacaggtaacggagacttccgtgctattcgtaaagaagcccaaatgatgggtattgaaaagcaacttgggtataaaggagctgatatgcttcaattccaagaagatgcgttaagtaatatcgggtttaccaataaagaagacctaacagctaatactagagctttagcggaaggttcacgtgcagttcctgttgattctgaaaccttaagcgggtttatgaacgaccaaatgcgtagaggcgctgtgagcggtaaagaccaaattaaagcgattcaggaaggtttcttaggagctatccaaaaatctggtatggtaggtcgtgaaaaagagcagttaaatgctttgaaaacattaagtgaccaatcatttagtggacgtaacggtagtaatgaggaacttaaacaacaaatggctatgcttacactgttgaacaaaactggttctcgtgccgtccaaggtgaacagggtgccgagttaatgactagtttatcagcgggtattcaaggtagtgtttggaacaacaaggcttctttattactaggtaagggtagtcaataccaaggtttaagtggtatgtatgacttagcaggtaaacaagaagagggagctacccctgaaaatctgcaaaagattattggtagtgtacaaaaagctgttcctaatgatgaaaaaggtcagaaatatgtccttaaaagtgctatgcacgaactatttggtacaaatgcaactaatgaccaagtagatggtatcatgaaggcttacggtaacggtaatctaaatgaagaaaatatcaataagattatgaatgaaagcgaatctactggtaaagataaatacaagaagaatgcagaagattatactaactcgaaagagggtatggctaatcgttccgaagcagtaactgagaaacaagcttccggtatcaacgactatggtgatgctctacgaggaattaattctaaattaggaggaatccctccggctatgtatgctttaggtgcaggtatgggtgccttagcaactgccttgattacttcgggaactatgggtggtctctctagctttgttaagaacttgacgagagggacattctctgccggagctacaactgctacaacagccggggcaaccagtgcaggtggctcattctttaaaggtgtaggacaagcctttaagtcaggtaaggctactggtggatggtcagcaggtcttaagagtgcaggtactacagctaaagacttagcaggtgctaatattgccggagctgaaactattgcaggagctacgaaagcaggttctgtagcaagtaaatttggtaaagtagcaggtaaagtagcgttacctattgccttagtcggttcagcaattgatattgcaagctccgatgacaaggtaaaatctgttggtgagaatgccggaggactagcaggtggatttgccggagctaaattaggtgctttagcaggtacagctattttaccgggtgttggtactgttatcgggggtgcattaggtgctcttggaggtagcttaatcggtaataaagccggtggtggtttagtagacggtgttcgtaagttctttggtggagaggaagcctatgcagacgaagtagatacaggtacttccgcaggtggacaagaaacgcttaaaggacaagagaacaagtctggtaaacaagaagaacgagacatgacgaataaacgtgtcctttctgaaaaaacacgtgctgagaataacgctgaggaagcaactaacttatccatctactcaaaattacttgatagagcacaacgaatcctaaatcaagctagaaatcaaaatggtatctttggtaactccaagggtgctaacagttctagtgatagtggtggtatcggtgacgaccctgcaagtaaggattttggcggagactgggaaaaagccattcgtcaagcttctaaacaacttggggtagacgttacagaccaagatgtagacacattgcttaaattgattcaagcagagtctagtggagatgaaaaagctgttcaacaaatcattgatgagaacaactttaacggttctggtggtgccaaaggacttctacaatacatccaatctacgttcgatgcttataaagtaaatggacacgatgacatcatgagtggttatgaccaattactagcattctttaacaatagtaactggcaaaaagacttaaatgcttggaataatcgttaccagaatggtagtacgggttggggtccaacgggtagtaagacccatgcgatgggtggacatatcacttctccggaacatgctttgcttggtgaggtgccgggacaagatgaatatgttattaacccacatcaacctacagctcctagattacttgcagaagcttctcgtaaaactgcacagaaattccgtttgtttggtaatggttctggggacgaatggtcttcccgtataggtggaattaacttatccggtggaggtagttcagcacaagcaccaacattaaacaatacaaatgacgttaaagttagcgtaaccgtacaaggtggcggaacttctgaaagtattgctaatgaaattggtaataaaacagcaagtaagattctgcaatcagccgatgatgcaatgagtttctttacaaaagaaatgaaacgagtttaagaaaactagggggactcgttccccctttatttattgaaggaggtaaactatggcggtagaattacgttatcctagatttaacctagcgttttatacagaaaaagacgaatatcatattacgtatgatgcacaaacaggtgaatctaatacttctgtagtaaacaaagataatgattcggaagtttctaataactttatgatagaatccgttatcagtttaacaacaaaaaattcaatggaagatgacagtgctgtcttttcttttgttctagccggagatgtatactgggatagaattttaaaagccaatgatgcagttgtattacggctttaccctgatataaccagtgacctacctgttaacccagttttattagttgggttaatctcagaagtacgacttgaaggagactatggggagaactctaagatgtatcgtattacaggtcaatcatttgctaaggctttaatgcaatttgacctaggtgttattcaagaagttagtgttgtattaactgatattggttggttacctgatgatgcccaagagggggttaagatgacaggtagaagtgccagtcagctagcagaaggaatgatgaaccgtttcttacagtatatgaaatttgactttaacggagaaggcttagagcgctttttagaatgggaattagacagttggacagaagcagagcggttgatagataataccccgtatattaactatgagggttccctaaaacaattgttagacgacatcacagctaaaccatttaatgaactgttctttgatgctacaccgggaaacaaatgtcgaatgattatgcgtagaaccccgtttgataaagcagactgggagaatttaactacgtatactgtaacatctaaagaagttatttctgagtcagtagcaacaaatgatacagaagcctactctatctttaatatttctataaataacctttatggtacagactctatgatgctcggttctaaaccacaggtattccctgctttagttaataagtacggatacaaaaaactagaggttgataacaaatacttgcagggtgcaattgtagataacagtgataatgcagatagtgcggatacaaatactgacggtgatacagaaacgaacgaagataccactacagaaagacgtacaactataaaaaaagatacgaatgaatctagtgcattcgacacgacttacggtacagtaatgaactatctacgtggttacccattagacatcttaagagtgaaacgtggtaatgttcgagctaaaatacttcaagtagacagacgtattacaggaacaatggcagataaaatcattgaccagtatattacaacacagagcttgacaaaagaacagttcacagatataactggtattaatgaaaagaatgctagcaagggaaatggtaaggaaaaacctacttataaaaaacttgtgaagttcttggaagattacaaggatgaagcagagaacaatgagactactacaatcaagaatgaacttatgaatgagttcaaattaacagataatcaagcaacatctattgctagtgagtttgtggctaataaaagcttgcgtaaaactcaatatgacgaaatcatgaaaaacaatcctagcgatagtacaacggtatcgggttctgataccaaatacgtaaaagaatttacgaagcgtttagctaactggtactgtgaaaatcctaacttttatagtggagatattgtagttaagggtagtccagaatatcgtttaggcggacgactattcgttatagacgaacagaacaacgaattgtgggaatactatattgaatctgtagagcatactttttcttacacgcaaggatacacgacaactttaggagtaactcgtggtcttaaaaacggaggtaaagaccgattcacacacctttgggacaagtcagaagacttctcaggaggtatgttgggtgaaaagaccttagaggctttactagaagagcaagaaaagaaaaataatgagaacaatagtagttctggttctagtggtggttcaagtggagttaacccatctaatattccgggtggtacagtagcaatgaaagctgtaaactggggacgttctcactctaaaacagaatcttcctttaggtctgcgtatgactggggaggcgggcgtacaggtagagacccatttgaaagctcacctattgctacagactgttcgtcatttgtatggtggtgtttcaaacatgcaggtgtagaattgaatggtggagcaactgggatgaccacatggagtattattgcggatacgaaacttgaaacaatagctactcgtggtcaaaagaactctgctatctttgataagatgaaagcaggagatattatctggttccgtaattgtgaacatattggaatttactgtggtgaaggaaaaatggttgcatgtaatggttcaggtaacatgaatgaaagtcctacagcaggtatcattgtgtcagacatgacaagtggatattggtgggatacattcgatggagacgtaaaaagatacaattaacctcgttaatagcgaggttttttgttgtaaaaaacaaaactagtatgtgtgctataatattaagtagagacacatacaagagaaaggatggtatcaacttggcaggaggacgtagatttcaggcagggttaggttccgaacataaaagattatacaaagaaggacaacaaattaatactttgttgctagcccaagttatccaagttaattataaatacaatacagttgatttactagcattacagcataaagaagtttttcaaaactcctatgccaatgaaggtagattttctgctcgtttaccaatggaatttggtggacgaaatcttgcaggacaaccatatggtcaagtaaaccctattgccgttggtactgttgtcctagtaggttttattaactctgataaagacatgccgattgttattagtgtatacaataacaacgatgtaaataaacaattatcccgtacacgttttgctaacgcagaccctacagatatggctttagcaggacaaatgtaccaaaaatttagtttgtacccatctttaacttacgatagtattgatggtgatggtaaccgagtagttacattctctggtaaatcatttattgcattcgatacaaaagatatgcaaaactccccaatgacagatgctagttatggttctcgttatgaagacctaggaacatcttactacaatgatggggaactaattgaaccgatgaaaggtcgagcaccaaacgtgttatttaaacaccaagggattcttgacgatgataataaacctgacacacataatttcatgattcatattaacccagatggaacatatcgtacatctatgatggatacggaacaagactggcggacaatgttcgaaatgacaccggaaggtaaaattcgtttacgtagacaaggagatactgtacgtttaaatgacgggtttgaaattggtgaactaggtattaacgaagagggtatcgtttacttacgtaacggagacatggacttagaagttcgtgaagatggtatctattcacaaggtaagttaattacagaaggtatcaatttagatgatatttatgataaaatctctaacattacctttgaaattaataagactaacgaatcattgcagattttaactgagaaatcagaactacaagacggtaaaattgtaaatcttgaaacagagattacaattgtagccggaaaagtagagtctaaggtaagtgcaacagaagtacaagatatgattgatagctctatcgtagacatgacagaggctattagacaagcccaagaagatgctgatagagcaaaccaagttatttctgacatggctagtgataatcgtttagctcctagtgagaagctagacctgttaaaagaatgggacatcattaagaatgaatacccaacttatttagcacaagctgaactatatgaagtagatagtacaacctatactgctaagtataaagcgttggaaacatttgttactcctttattagcagacatggaagctactagtgtagtagacggttctattatgcgcaaaacatttagtgcatactacactgaacgaattaatctgttaaatgcaatcactaaaggtttaaaagatggtttagaagaagcaatgaagaaagcttctcaggcttctgttgatgcgacacaagcattagccgattctgcacaagctcaaattgatgcaaacaatgcacaacagttgattgcagatattgctagtgatggtaaactaactgcttctgaaaagtatcagttgaaaaaagaatgggatgttattgctaaagaatatcctactacaattgcccaagcaacaaagtataaagtcaatacagataattacactgctaagtataaagcgttggaaacatttgttactcctttgtttgctaacatggatgaaacaagtgtagttaacggggaacaattacgtgttgtattttctgattactatgctgtaaagattactttactaaaagaaattacggatattgctcgtgatgaattaactgattacggtaatcgtattactgtagcagaaacaaaaatcacacagacatccgaagctattactttgatggctactcgtgtagaaaccgttgagaataacgttaaaacgaatactgcacagttgaaggtacaagcagacctaatcagtcagaaggtaacagctagtgaagtaaaagatgcaattgataatgcgattgacaacatgtctattggtggctcaaacttgtttgtaatcaaaacacaaacagcaggactattgaatgaaaacgatggtactgtaggaacagcggttgataaatctgtagtatctaattatattaaagtaacagctaagactccttatgtagcttctttatatggaaatataggtacaaacacaattatcattgcatggtacgatacaagtaaaacatttatttcaggtcaagctgtagctgattccagtgatttccataaaacgtatgttgcaccagaaaatgctgtgtatgcacgtttaagctataaaaaagctgatactgttaaaatgaaattcgaagtaggtacaaagccaactgattacagcccatcatgggatgatattaaaggtgaccaaactgctttagaggaatacattaaacaggtagaagaacaagctaaacaggcacaacaagaagctgaaaatgcgaagaatgaagctgaaaatgcaaatagtgctattgctgacatgtctaacgataacatgttaacagcgaatgagaaacaacaaatcttattgcaatgggaagaaattaaaacggaatatccaattaatttagaccaagcaactaagtttggggtttctgccactcagtatacaacatcatataattctttgaagacatatttagaaccattattagcagatatgacaacaacttctgtgattattgggtctactatgcgcagtacatttacaacgtattatgaccgtagaacgaccttgcttaatcgtgtagctgaattagctaaacaagtagctgaccaagctaaagataccgcagataaggtagacgatgacttaaacaacatcggtggatacaactacatcggattctcttccggagaccatatgtaccctcgtttaatgattaagaacgttggttattactacgttccttctacaacaagtgcagaatttgtagatgatatggtttgtttaaaacctaaaacagctacagctacaagtgttcaatatgacatcggtaactctagtgctagtgtggctaacgttggacttgctaactatcgaatgaaagaagttaaaacaggtcaatggctgactgcttctgcaaatttaaaagttgtgggaacaggtactgcttatctaactatttttacactggaaaatggttcatggaaagcttcatacagtgatagaattagtgcaaatcaaggtgtaacccgtgtagttgctcaaagacaagttacagatgcgactacaggtattttagttcgagttgatggaagtaacataaccgaagttcatttcggaaatacgcagttagaagttggtatccgacctactccttggaagaaatcagatattgacattcaagaagacatcaacaatgttgcagatgacattaaagactatatcggtgctcgttcagataacctaattacaaacggttttggtgagttagggaacaatacgaacattggtggtatctttgatggtgctgataggattgtaggtaaaggttccttccgtcaagaagaaggaaacaaatcactattattcagtgaacacattgttattgacaataaaaaagtttataattttgattactatatgcacacattaaaaggtgtaggtagaagttatgccatgatttgtccttatgacgtagacggtattcgtattacttacccttctcttggaggacgtaactacaattctactactcctgttaaatttactaaactagtaaaaccacttaaagttggagataccgaagtttatgtagaagatgtgagtctatggaatggtcaagcaccacaagactaccaacgtagtattatcatgtggggttataaaaactcatttggctatacttatcctgatggaacatacagtcagctaatgcaaatgaaaacctatgatattggtgcagttgatactacagctaataagattacattaaacaaaccgtgggcggtaactaaccctaatagttcagacggagttttcccagtaggtcatacgcttagtccaacttctgatggttctacttacttgtacctaactggacatgtaaaccttcaagtaccaactacgtatacaaaatatagccatttgattagtggttctactgagtttgctaataccacacttattccagtagaaacaggttctattcaacttggattcctattaaaccgtgaaacaactggtgaaaaatcttggctaaatggtttacgtttacgtgattatacagacacgtacaagctaaacgatgatgtaagagaaacgcaggaaaacgtagacaaagcccaagcagatgctaataaagctaaccaatcaattgctgacctatctaatgacaacctagttactcctaatgaaaaactagatttgaaaaaagagtgggaaattattgttgctgaaaaacctaagaatgatgctcaggcagataaattcggggtaagtaaagtagcttatggtactgcgtacacagctttagatacgtatttgaagcccatattagcaagcacaacaacgaactctgcgattgttggacaaactatgcgggatacatttaaagcgtactacacagctcgtacagaccttttaaatgctattgcatctaaagctaaagaattggctgataatgcacaagataccgcagataacataactgtaggtactcgtaaccttttagttggaacgaaggacttctctaaagggattccatctggaaacacatcggtaacgattgatactgataaactatttggaaatgctgttttaaaaaacaacctagtaggtacaacaggacagtctgatatgtacaaactagctacatcaataacaccaacagctacacagtacacgttatctttctatgcaaaagccgatacagctaatgcaaagatgtactgctatttttatgaacctaatacaactacaaaagttgaaactagtcaaggtgtaaaagaaacaactttgagtggtaatggtgcagttcaaattacactcagtaccgagtgggttaagtactgggtgacttggacacaaactgctactactacagttaaatctgtgataatcggacgagtaaaagccgaagatactccaaagtcagcagtatatatgtcttctccaatgatggtggagggtaataaagcccagacttgggtacaagcacccgaagatgttcaagaacaattgaacggtaaagaaggtgcatgggtttactctccaacagcaccaacaaatccggctgttggtttagtctgggtagactcttctaaaactccgaaccaaccaaaacgttgggttggtggagaaactggatgggttgccttaaccccagaagaagtaaaagatttaccttggggtgaagatggttctagtcttgctgactgggtagcacaagcagagcaaaagatttcttctgatgcaatcattagtactgtactaggttctgagtactttaccggtatttttgatacgaaagcaaacacagaagatttaaataaccttgcttcttacgatgacttagatgctatgcaagctgagtatgaacgtctattaaaagaagggattgcaggaattgacttctcaccatatgtaactaacacagagctagaacaattgaaagatagcttcactttctctgttcaacaagccggtggggttaatatgttgaaaaactctctagggttctctgggacggacttctggcaagcttcttctggtatagacactactcagaatgaacagttatcaaaattaggatttggttccggatttatgataaaccgagttcaaaatgcaacactagctcagacaatcgaattacccgaagcaaaacaaggtttgcaatatgctttatccttctatatgaacgtagctacttttggagatgtcactgatttccaatgtggggcacatatctacgaagaaggtgtgttgaagtatactgttggggtaacagatgctacacaagaaatcccaagtgactatcacttgtataaacttgtatttgaaccagagtctccgaatactgtcattgaattatttgttacaaatggtgcacaggcaactgtaatcatttcaggggttatgtacaatattggtaacattgcgttgaaatggcaaccatacccaagtgaaatctataacacgaacgttaagattgatattaatggtattactgttaaaaacaatcagacagatggttatacaatgattactccgcaagagttttcaggttacgcaagggttaacggagagatggaacgtatctttaccctaaatggtcaggtaacagaggttaagatgttacaagcagagaagcgtattacaatggaacctatttccgtgtttgcgatgaactctaaagaaaccaatacaattggttgggcgtttgtcgcttccggagaggttgcacattctgccatagcatctcgtacacaatagaaagagggagccttatctgtaaggctctcttttgttgtgttgtgctataattatattatgagaaacaaaacaagaggtgagaaaataaatggctttaagcggtagtacatacacagcttttgcacggcataggcttgtgttagaatggagagcctcccagaatgttgcgggcaactactctgatgtaagtatttggttatacttgcagtctatggattcctatggtgctttatatgctcctgctgttggacaagcacaggtaacagctaatggagttaagcaaaccgaaaatgcaacatcacaattgaatgcttatcagaaaaaactattgctagccaaagtttggcgtgtaaatcacaacgcagatggtagcaagtctttttctatatctgctagttatttcgtaaacgtaacctattcaggtgtttactacggaacaatttcgataccgtcattctcggtttcattaaataaaattccacgtaaaagttcgttaaaccctgtgccagatttaaatattcctaataaactaggggtaagcattactcgacaaagctctagttttacacataatttaactgtttgggtagctaacagaacaaatcctacattggataacgactctcattgggtatatttaaatggtattaacaatgtaggtacaagtggtacattcacatttagtgtggcaaacttcacagagatgtttaagaggatgggtacaagtaccgaatgggtaggtaaggtgaagctctggacgaatggtttaagcgagtcagtgccgagccaacaacgaaccttccgaataaaacctccaatgaacgcacaggcttctgggggtaagttaaaagtaaaagcaggagaaaagattactgttagtctaagtaacttccaatctgacggtaactttaaatatacaggtgtttttgattatcgaggggtatccataccagtagcaacaaatgtacatgcaaactctatgactcttacattaactcaagcaaacgtggattctatcttgaaagaatctccggatgatgcaggaacatgggggcaagtacgagtaacaagttactacaatggtgtacaatatcgaactccttggactggacagcatattgattgtaccattcctaaagaagattacctacctgtaataaacggaacaccgacttatactgacttaagtgccgaagctactaacgttaccggaagtaaccaagtagcattacaaagtaagtctaatatccgtgtgactattccggctaactttgccacaggtcaaggattctcaacaattaaaaccgtgcaagcttcattaggtggggctacaaaaactgctaactataatgcttctggttttaacattgatattggtgctccaaatgaaggtactgcttcttcattagttgttactgttctagacggtcggggatttagtacatcttggacaaaaacagttcaagtatatccatatagcaatccagatgttaactatacgattgcccgtagaaacaactttgaagtagatacagaattagctgtttcaagtagttgggcgcctgttactatcggtggtgtaaacaaaaatgcaattacgtcagtaacctacgcaactaaacgttcaggtacaagtacatggggagaagaaacaccagtaactttctccacagatggggctaaagttattgtcccaacaaccgttgttcagttacctaatgagtacagttggaatttcagactaactatcaaagataagtttggtagcttctctaaagaagcaaatatttctgccggaaaacctattatgtttattgatgctgttcgtgaatctgtaggttttggtaacctgacaggtacaggggaaaatagaaaccttaacggtgttattgaaattgaagctgaacggtatcataactcaggtaaaaccggtatccaaatgaacaacagtgatatttctggtttgaacgggatatttttctctaatgacagaatggataacgatggggaaggtattcatttcatcaaatcaggtaaagacgttaactccccagaaaactctaaagactatgaccgattttacatgagagataacggattctatgttaaccatgatggtactccaatctttaaagttactgataacggtcgcatgtattaccctgctacaatgctgtggtctggtggttggtatatgtccggtacacaaaatataaccccgtcaaaaccaatgtcagagtgtagaaatggatgggtactcatgtgggctaaataccaaaatgaaacacaaacatgggatgatgttgtacaagtttatttaggtaaggatttggtaacaacacatagcggtttaggtatcagactactatttggtggatatggtaatgttatcgttcataaatacttgactattactgatacacaggtaaagggtaatgcacaaaatactaatactaatttaaatgctgaaaaagctattttagttcgtgttcacgaatggtaaacgaggtggaaacgatgaaaatatacgtagcagttgatgaatataacgtattgactggatggagtagtagttacgaagaaaatctaattgagacagagattgacgaaaatcacccacttattgtctctaatgatttttttggtaattataagctcatagacggtaaattagttaaagatacatctattgaattgttaaatttaaaagacatgttaaaggtagaattagaccaacaatgctcagaagctattattagcggttttaactacccgttaacggatacagaaacacttcacgtctcttattcacgaaataaacaacaatactttgaagagattaagtctcttttcgaacgtaaaattgttactcgtattaactgggagtttactactgatgatgaagctactattactaaagagctaaatgaaatagaatttttaaccttgtacacttttgctagtttggttaaaacagcaaaaatgactaagcttaaagaaaaactatatccactagttgataaacaaacaaataaagaagacctgttgagtattacatgggattctattcctgatgaaccattaccagaaaaacctgttattgatttaaatggtgatggtgaaataagtcaagaagagttcgatgctttggttaaggaaaacaaagaactaaagcaaaaagtagaatttaacgaactagctttaatggatgcgattaacatgctatcgagcatgattatgaattaattttagggaggtgataacatgtatccacacttagcaatgctttacgcaacgtatgtcatgaaagaccctgcaacatggacgatggacaaagttcctgctatgattcgagaagatgtacaaagaattgtagatgaaatgacaaaaaaagaacaagcacccgagtagtctttctaacactaggggtttccattggtttagtcgcaggactagctattgggttcttcctataatgctcggggagaggaagagggtggcttaggctgtcctcttttttcttagttaattgtactatattaatggacgaaaggacgtgataagtgtgggacaatcagatggaatgggcggaacattaaaaagaattgctattcaagttggagacgacccaaacacaggttggtatagatttcaagttaacccaactcaatataaatacagcaaaccacaccgtgtaacaatctttaaaacaaagtctaacattatcactgaggactttggtaaagatattgaaaccattcaattctccggtacaactggatttagaaaagactctagaggaatgaacggtgctgatagattaagagaactatctaatttgatagatgattatgcaaatcaaggtggtaatggtaaccgtccaaaagtagaaatgaagttctataattttactgatgaccaatattttgtggttcatttagccccagaaggtctcactatagaacgttctgcggaacagccattactatttacttatacgttaagtttagttgtgttaaggaaagcaggagaacctgctgaacgtgaccaagtaaacccagaaattgggaacaaaaatccaagtgtaggagacaaggataaagaaacaagaaatggtataattcaaactcctgcacaaatactacatgaacagtacaaaaattctgtgttgccaaatatagcagtaaaccctagtggtacatccggtgcctataactacggtttagttgaactaaaaagattaataggttacggaggtggtcagtaatggcaactgtatatcaatctgcggacttgctaagattctttcgttacttaaacgtaaacgtgcaaggagatgtcgttagtaatgtcatagacgaccaacctaactttatttctagattttacacaccgcacacaagagtgaataaaatatccagtaccttattggatattgtgaaagataataacattagtgaaacaaacaaagagttatccaaggattcactaacctataagttcttgaagagtgggctacgattaacagctcctgacatttaccagttagctcaaatcgtagtacttgaatcttttgctttgatttatgcaattgaagaaaaacctgaaatgttcaaaatgattaatgaatcagatgtgaaacaaacaagagaaaacgtaaaatatcttgtggactacttaggggagaaaaaagactatactgatattgtaatggatttacactctatggatattgcccttggttatattcaagaacagattccattaattcaaggagggctaccagtaaatggcacgatataagaaacatacaatcgtttatggagaaaccatgcaatctattgctcaaatggaaacaggttcagtaaacgactggataaaaattgctgagtataactccttggtttatccatacatagtagatactatgcaggagaaaatggctaacattgaacatttagtaacaccgggggatactttggtaattcctgtcgaagctaacctactagacatggacgtaagtaatctaaatcaaagagacatggattttctattaagtttatctctaggtcgtgatttagacatgacaagtgagacagaatactatgaaaatcatggtacaagtgatgaagtgttctcattaacccataacgggcacggagaccttaagacggctagtggagcagataatataaggcaagcaactatctctcgtctaatgaccgctaaggggtctttaatgctacatccagaatatggtagcaacctacacctactttttggtaaaacaactattgaacaaatgaaattgattagcttagaagtatgtgaaactgtattaaaagacactcgggtagctgagtgtgtattggttagtcattatatcgaagaagaccactatgtaggaaactaccgagcaaccatacaatcaacaaaagaccaatttgagtttgtggtacaaaatgatagtgtgggtgcaattgttatagaatagaaaggagtatccctgtgagactaaagaaaatttcagaaattttaggtagactgattgacgtaaccatgattaacactcatgagttaaacgacttctctgtagggtctactattcgttccatttacgaagccgtatcaatggaacttgaacaatattatatcttaggaagagaaaacattttatggggtatcgaacagggggtacttaatgcttttgattttagaaaacgtgaagctaaaagagcttacggtatggtaaccttagagttccatactgtcacacaaacccctgtttacgtacctacaggtacaacttttgactctagtttgtctggtgcacctagtaatctaacattccaaactatgcaggactatgttattcctgccggagtggttactgctaaagtagaagtatactgtacaacagtaggttcccaaggaaatattgccaagggaagaataaatcgtgttattaacaacatctctaacttgaaaaaagtgtataatgaatatgacatacttactggtacagatgaagagagtatcgaatcggttaaaaaacggtttcatgcctttgtagaatcccgtggtcgagctacaatcaaagcactagattatggtacacgacaagttgaagaagtatcaggtgtctatatcaaagaagaagtcggttatgtacgaatttatgcccacgatttaaacggggacttgaaagacgaaacattagctaaaattaagacagctattgaagattatcgtcctgcgggaataaaactagacgtgttccctgtagtcaagcttacggtaccgattgatgtaacaatcacaattagtaacaaaaatagaattaacactgcactagaggaacgaatcgaattaactattagaaactacttaaacagtcgttcagtatcagaaactttagtaaaagctgatttattgcaagctattatgaatattgatgataacttaatttatgactgtgagattaataatcttagtggtaatctagatattagagacgaggaaattattcgtgcaggagacgtaacaatagaattaatctaggaggtaacattgtgagtaattttttcagaaatatacacccactcttgcgcagaagtaaacgtccagagaagtatgatgacacgaacttcgctgtgttaaatgcgttaaactatgaattaacacaagcagagcaagaaaccattgctagtaaaatacaatcctccttagagtctgctacagatacgtacctagacacttggggagattggttcggggtgtaccgtaaagatggttgggacgatgaatactatcgtgcacgcatcatacgggagctacttcttaagcgaggtacagtgcctgccatcattgatgcgttattagattttcttaacgacaatgatgcagtcattcaaatatacgaaccttggagaaacattttctatacaaacaaatcgaagttaaacggtgatgaccatttaatgggttactattaccgatttgcaattattgatatttcaattgatagaccgtttcctcctgaaatcgtagagattattaaggctttcaagccggcgggtgttttgttctacctaagattagatactagcttaaataagaataaaacaactgtagaaagtccttacgtgtacttagatgtgacaaataagacagaattagagttccttaatggtttatactacgacctacgaggtaatattagcttatctgaccaacgtacacaagttgtagagaataatattttccacacaaacaattctatgttaaatggagaagacgtacttgcaggggcgtttgaccacggaagaggttatattcatctagcaagtacatctttgactaactacacaccaaaagccactgattcaatgagtgatgtaaaaaatacattaggagaagcaggagcggatttctatagccaaacaaaagaattagatggtcggacagctcaaataaatgttccttccactaagaatatccacacaatgtactcaaacactaatgattttagaaagcctaatctattacctatatataattttagtaatacggctaactttattcgtaatgattctatcttttctgatgggggaacgtatctaattgctacaaaaaacggtgtaggaaaacaagcttcaattgcatttggagttactgatacgacctatataacccctttattagcaccaagtacccaatataagttaactttaagattacgagcaggaacaaattataaaggcgtgcaaggtgtagctatcccagttcgttacagatatactaatgctgacggaaaagggagctctctacctatttccggtagtgtagactctatgaacttaacgaaagattggcaggaatttagttttacaggaactacgttacctagtattgtaacaggtacgaacccatatatacatgttcttgtcccatcggaggtagaaggctctgtagaagttggatatgatataaaactagttagtttgcctgaatatgattatagcggtaaccctaacgttgcaatagtagacaaaaacttatttgcaaatggttctggggcagtaactacgtatagcaatggtgtgtacagtttcgaattaactggaactgagcgtgttgttaagtataatacagcaccagtaactagtgctacagttttagatggacaacggtacacattaagtgcagaaatttatctaagtacagattacgttggctcaaaagaccaacttgtattacagtactcctttgtaacaggtgggtacactatgttacaaactggaagactatcacctgatgctccacttggacaatggttaccaataaaaggaacctctgtagttaattacgcagggcagtctcccaacatgttttactttgcatttcaacatttaaatttaactgatttccctaaagggacagtgaaacttagaaaccttaagattgagcgtggggatactgtaacaccgtaccaaccaaatttactagatgctccttaccagttatctaagattccgttaaataaaaacattgcaaatcctagtataaaatacccaattaatacctctgcttaccttgtatacggtagtagaaatacagaaccgtataaagcaaatcagaagtatacactaactcttaaagggacaaagcaaaccacacagtcctttaatgttttcctaaatagtggaacaattggcgtaggtgccatgtctagggtagagggacaagcaaatgtatggcaaaaaacatttactgtctcacaagctcacattgataatggtgttctggatatgttaactgtctatcaagtgcctaattctacagcaggttcaacaactattgaatggttgaaattagaagagggtgatgtagctacatcacctattgacaactataaatacatgggggttagaatcgaaaacacagacagtccgacaacagacccgactaagtacgactggaagctaaatgagccaatcacagggcgtagtgcttacatggcttttgacattaaaacgtttattgacgagaactaccgtgttgagtttgacaaactggtggaagaactaggagaagatgaagcctataacaccctcttcgagaactttaaggtctctactgcactaaaagcattagttagccctagcaacccactaaattgtataatagagctctttgatttctctacgaatgcttggcatgtgctatctagtactacattagatttacgtacaaaagttcttaatctagaagctaacagggtaacagattacctaaatgactatcgcttactatttgttcgatatagttttaccaatgtaacaagcaaagatgttacagtggaattggacatgttaaacatattatttaactaccgattaggtgatggatacagcgttggtttacagagcaaagtagaaacattaacagatataccggcaagtgatgtaagtttatcaaaagacacattagtactagggataggtgaatcagagtcagtaactgcaactcttttacctgttaatgtaactaatactaatttagaatggttaattctagaccctaacattgctaaggtaactagttcgggtaatattacggggttgtccgaaggagaaacaaaacttatagtttacggggatgaccgaaacgtaagtgctgagtgtgatgtaaaagttgtaattagacctacagcaatcgcactagacaaggaaacaataaatattaatatctagaaaaggagttaatcatggtatatacagcttacgcaaattcagccgatggcacaaaagactttactaaagtgaaacctaaaccaaatctgtataattccggtctcctaaattctgcctcctctattattgtagaggagacaggatttaagcttttaggaggttgggctacaccagtaatcaaccacgcaaatcttcggaaaattctgaaagtggggcatacgtaccatttttcctatgacttcgaattattaaccctgcaagaaggaactgttccacatactcaatatcaacatacaactttgtttttatatagtacaaaagattcaagaaattatccgggaattatgcttacacagtatggtacttcatcaggtaaccttgaattaataaacaacctaaaagtaggagatattgtacaccacacgaaatcggtagcaatacctgaatgtgtaggggacgtatttgctgactatcgtattcttgcttatggcagacgaagtatgaacccagacggtacattaaatcgtatggaagacggacgatttatgaacatcaaaatcgaggactctcaaacaggagagactgtttacctgcaaaatgctattgataatctaggtaaatcctatatgcgttatattggtacctcaaacactgatagtaacaatcctagcgattacacatggaaattgaacttagtagaagaaacccgccatacaataacgccagaaaatgcaacagtgaaagatgtaacttatagtgtagcagataaatcagtggttaccattacacagaatgatgaccataccggcgttttactatctccggaaagttacgggaagacaattctaacagctaaaactgtggatagcggtaaaattgcaaattcaatggtaaacaccataaaaacattgaacttagatcatagcaatcgaatttctttatcaccagtgggggatgcacacaaaatacttacggatattaggaactccggtacagttaacttactaacaggtacaggagatgctagatacgcaagagtttatggagtaaggtcaaataattcatcagtgctcccaataacctttgaagatatagttgaatcagataaattagcttataaccgtgtcagacgtgcaaagctagcagatggtacatgggggtctaaattctttagtctgtacatggcaggtgcacctgtagagcaatgggcaacagaagactttattggaactggatattggttttcatttatggtacgaagtaacatatcactaacaatatctaaagctgttggaacgggtgttagagaatttacaggaggtacagcttacggtagagcagacatacccgaagacataccgttagaggcagataagtggaaaatgattaaaatgtgggtgccagaatccgaggaaagtgctagattagctactaatattcggtttattctagggacaagcaatttaacagatacacaactagctactgcatcattagacgtaagcagacctatggtatctaaagaagaaccctactattggttacctgctccggaggatgttggggtacctcacgggcaaccaaatttagctaataatacctttaaggattggaaaagctatacatttactgcgtggagacctaacgatatgttacggtctataaaccccgtagacctaggactatctgttggggatatactaactgttaaatcagagattataaatcctgcggacagtaatgtaacattaggtgtagaaatcgcacaaacacatgaaggtgtgcgtattggtggaacatcaaataaaatcaccagtggtactagtggaacttctgttgcatctcttacagttaaaaacctagaaaaccctattcaagtaggggaaatggtaaaaagtgattcaagtactaccgtaactggtgcgcaagctagaagattaaaattaataaagggagacaaaaccctaatggacttctggacaccaagttttactgattttagcgcaggtaaatatccactaaacccttattttgaagtagcacaggaaaactattcgaagttagctacaactgctgaacttaccaatagtactaaaattattggaacaaaagcggaaacacaaataatatttgatactgttaacgcagttcgtgactacttccctagagagttttcgggattgacaactaatgagagtatattagttaaatttgcaaccattgttaaaagtattaaagtggttatcccgttcaaagggggttctagtactcgaacgtatgctgaacgaggtatcataagcaatacaggtgactataacggaataaacacaaatgtaactacaaatttagatagtcgagaacatgtgctaacaagtaattatgcaccgtacattcaacaagacatgactatgaaatattttgtccgtacagatgctacgaatgggttagtggctagctcagttacaataggtaaacctgttcaaacggttattgtgcaaccaagtgaaaatccaaatggtgaggctgtagaaattacagtttctcctaaagtataaaaggagagataaactatgccagataaaattaatctagttgatgttgagttaaaaatcccattaactgaaatttcacaacctgtatatagtaaagtacgggttcgtgttccacaagtattgattgaggatgaaattgtactagttgaagacccggaaggtaaccctatactaacaagactagctcttgaagtagaattggagaaatacgtaaagaactattctgagttagatacgaagatagctaactttagaaaagtagcaagtgagctattgccagaggggttgagcgtaacagactttgttagtgttgggctaactcatgcaacagttattgaccagtttttaaaatctaaatcaagtgaagcaaaggttacctatctcgcagtttgggacgatgttaccaaggtagatgcacctattattaaagaatcggataaacctacaacagactccgattttcctagtacagagatacctcctgaaactgaggaagaacctaaccctgatgagggcgtaacagaataatatgctataatataaatagggcacgatgctgtgtcctattttttaattgaatgctatattatctaatgaaaccatagaagaaaagaggttataaagtggctattgcaactaataattcccgagtgtatgcttcattacaacttaaaaataaaaaagacagcatgtacttagttatcggtaaaacctcaccttggacaaatgaagatgctccacctgctactgaccccaatacttcaacactacaagaagttgttggttacaaaaaagtgagtaaagcatccttatgtcgtgaatacgttgcagatgacgaaaacaagtatccagtaattagttatggaactcgtaaatttacattaataccagatgaagatgcttatagagaaaaagcatggatggtatacattgaatctgaaatcgtaggtgatgagttgcctttaggtacatttagacaggtaggtattcacactgacctagtaccaaaaacaggtgtaagcaaagatgccctgctacctacagaagtaacaagtgcaggcatactacaattctttgagaatagacagcaacaaaacagaactgccgatgtaacattaagagagaaatttatcgttacaatggaaaacggcaaaacattaaaagcgtaagaaaggacgataagcattggcaaaagaaattacaaatgatgatttaaagaaagcgccctaccttgaccgctttgaccctaacaaaaacagaacaagagtcctgttcaaaccggataaaccccttcaacaagcagagcttaacgaaatgcaagcaatgcaagactacgctttatccaatgtagcagaatccgtgtttagtgatggggacattcaaacaggtatggaatacattattcaaggaactacccttactgttaaaaaaggtaaagtattccttggaggaaaaatgcgtaactttaatgaacaaagtattgaaatcacaggtacaggtactgagtacattggtgttaaacttgttcaaaaagtaatcaccgcagaagacgacccaaccttgttagaccaaacaagtggcgttcctagtcatttctcagaaggtgcagaccgtttagaagaaacagttgtactaggagtaaacgatgatgaagcttcaaatatctatcgctttgaaaatggtcagctatatattaacccagatacaccagaaatggataaaatcaataaagtgctagcagaacgtactttcgatgaatctggttcttatcgtgtacgtggatttgatatgtatacagaagttcatccaacagaccctaacaataaaattcagttagtgattgattctggtcgtgcatatgtactaggttttaaagtagacaaacctacgactactcgtattgacattgataaatctcgtgagttagagacaattaacaacgaaggtttctattacagtaacgaaactcgtttaaataaactaggtaatgctcctgtatctagcgtagaccgtgtaacagcccaagtagaggtagctaaagaacaagtatctcgtggtgttgttggtggtggtactgattaccttaaaaatacttcggtaacaaaagttgttcgtgtatggacagaaggttccggagcacgtgaatataagcaaggtgaagatttccaactagttaatggtcaagctatctcatgggcacctttaggtcaagaaccacctgccggaggtacttactttgtacaatacgtttataacaaaacgatgattgaaaacactgattataaagtaactgttaaaggtgaaggagataaccgtgaatggtatattgactttaatgaaatgacaggttctaaaccagtagacgaatcattagttaacgtagactacaaatacttcttagctcgtaaagacttaattgtactagaccataacggaaactttacagttcataaagggcaaccaaatgcaatgcgtttagtggattcaccaaatcacgttgacccattaacattaaacattggtacagttcttgtttacccagattcaagcacagcagaagctaatcaatggacgattactcgtttgacaatggaagagctacaaaaattatctgtacgtgtagacaatatggaatacaaccaagcggtattctatcttgaccaacctgcgatggcaggagaaaacccaatctatttacgtggtgtgttctctgatgcgtttatctctttagataaatatgatacaagtcatccagatgctacaattgcttttgactttgatacagcagaaattactttaccgtatgcggaaattaacaaaacagtaccttctatcatcgaaggctctagtgaagcacatgtatggggacggttagtaaccgcaccgtttaccgaagaagtgggaattagacaaccatttgctacagaaacaatgaatgttaacccatacaatacatttaacaaacagggtgtattgactcttaacccaagtgcagataactggattgaagaagaacgtatcactatcactaaagaagaaacgtctacaatgactattcgtcaatggtggagacacggtggagaatcatggacaaatgatgaaatgaaccttgtgtctaacgtggatttagataatggtatgaactggaacgacttaaaagatgattaccgtaagtctggattgtctggtactacactgtctagtggtggacaacaaacaaaagagtccatgattgaatttatgcgacaaattgacgttgaggtatacgcagaaaacttgcaaccgaatgcgaacaacttagttgtatcatttgatggtttacgtgttcctgttacaccatcttctggataccgtaaaggctcccaagagggtactggtatggcaaatgctgatggtacattcaaaggtatattcaaaattcctgcgggtgtacgttgtggtactcgtgaagtatctgtccgaaatgacaccaacttagcaagtacaacattcacagcccaaggaacaatgaaaacgactgaggacatcattatccgtactcacgtgacaattaacctagttgacccattagcacaatcctttagctttaatacaaatcgtattgctactagctttgatgtgttcttcgcttctaaggatagcagtactaacattatctgtcaagtacgtggtatctccgaaggtggtcaaccaaataagacggtttatgcagaacgtgtattaaaaccttctgaaatcaatgtatctgacgatgctagtgtagcaactaagattacatttgatgacccattgatgtgtaaagcaggtcaagaatactgtttagtattcattactgactctgataaatacacaatgtggattgctacaatgggacaaaacagaattgatgacccaacgcaaagtgtgaactctaacccttacttagaaggtgtgctttacagttcatctaatgcgagtgcatggtctattcaccaaatgtctgacttgaaatttactgtatacacagctaagttcaatgaagaagctgtcctagagtttgacgtaatgaaaaacattaacgtagaccgtgtggttcttatgtccacatacttaactcctgcgaatacaggatgtaaatgggacatgaagattgttcttgacaatgagcctgccggaactactgttaatgacaaaccgtgggttccaattgcgaactacgtagacttagatgttaaccagattgctcgtgaggttaaacttcgtgcaacatttaaagcaaatcaatatatctctccaatgcttgcattagatgatattatgtttgccggattcttaactgctctgaaaggtagttatgttgctcgtacaattgacctaacagaagcaccgtataacactattaaaatgtcttatgaacagtttactcctgccggaactactgttgttgcaaaatacagtactgacgaaggtaaaacatggaagacatttacaacacaacctacaacaacacaacgcacacaggatttcgttcgtgtggactatgttgaaaaggttaatacgggtggaacatttaaatccattaagttccgtcttgacatgactacacaaaatagtttcttaagacctcgtgtccgcagactaatgtgtaacatgactgacaaatagtcaaccaagttgaatagcctctatatgctatactaggcatataggggttattttttatgtaaaggagacttattgatatgccagaatcatttagacaaaaatcatcaggagctttaatttttagacctacagtttctgagaaaatccactctaaccagatgaaagctcttgctaaagataaagagaaattgaacagagacatacaagaggttaataatttaaagcaagaattgactaaggaattagaagaaattagagaactaaaaaacaagttaaaaggataaaatgtcctattttaaatttttgacctccttatatatttaatattatatatttaactatttatctaagttatatgtatttatatattatatatttatatataagggaaccaaaaatggaaaataggacattgacatacacttacagtactggtacaatagtattgtaaggtgtgagacattattaggaggacttatgagactagtaatagatgtaatgcacactcagattagatttgatgaaaacgaaggtagccttcgtagcactatacataaagtaatgcacgaagaacttggagtaaaagcagacggctatcaatttagtcctgcatataaatcaggttactgggatggtattattgatttttataataaagacaacgatacatttcctacaggtctagtacctaaagtagaggaaatcctaggaagactacaaactgctatgggtagtagaggttacatgtttcaatttgagattattgatgacagacccgacaaattcatggaagttgaagaaatggactcagaaattaaattgaatggtgacaatggagaaataattactctacgtgactatcaatatgattctgtaaaaagtattatcgagaagcaaacaggtattatcaatgttgctactaacggtggtaaaactgagattgcttctggtttaatacagcaaatcctacctgctttagaatcgggagaaaggattgcattctttacaaacagctcctctatcttcactcaatctatcgaccgtattgaaaaacgattaggcattaaagtaggtgcctttggagcaggtaaaaaggatattcaacaagttacatttgtgatgattccaacaattacctctgctatttcagcagacccagaagccaaacttaaacttacaccgaaagagcgtatgtacaaaaagttagctaaagagattgctcctaagttccttacagggtttaatcaaaaaggactacttgaaggttacatccgtaacttccaagtgaaaacaaaagctgacttacagttgaaacatgaattggaagaggcttactacagttgtggaaccaacaaacaggtagtgatgaaaatgcgtagctatcaagctgagtatgaaaaggtagtcgagaaaaagaacggtaaggtcttgaagaaatacaatgaagcaaaagagtttttagaatctgttgctgttatgattgtagatgaggcacaccatactagctctgatacttggtaccaagctctaaccgcttgttctaatgcccaataccgcatggctttaacagggtctatcgacatgaaaaaccatgtgttatggcaaagaatgcaagccatttttggttccattactaccaaggtttcgaatgacaccttaatcagtttaggtcactctgcaaaacctaaaattaccattttcccaattattgcccctacagacatcgaaaactccaattacatggatgcttacaagatggggatagtggacaatgtatacagaaactctttgattgctaaacttacaaagaaaatgtatgagagtggcagtggtgtactggtaattattaatcgtattgaacacggggaaacgattagtgagttattagatgcagaaggtgtaccacattacttcattcacggggagcttgataatgacttacgtgatgaaaagttacaagaaatgcgtgacggacatttgaaggtgatgatttcctcaacaattattgatgagggggttgacatctccggtattgataccttaatattaggtgcaggtggtaagtccttacgtcaaaccttgcaacgggtaggtcgtggcttacgtaagaaaaagacaggtgaaaacaaggtatctgtttttgatttttacgacttgacaaataaacacttgaagaaacattcggaagagagaagaaaaatctatgagaaagaacaatttgagattgttgacatccctcttccaacgaaataaacgaggaggtacaagatgacaagtcaatgcttaacaaatgaaattcgagcacaatatagtctaggcaacggaattgttgagttcgttgaaagattagctaaaaaagcacagcaatggggagaaacatttgctacccctatacgtaaaacaactgtagctgaggagatgggacgtgacacacgtactgttactcggtatctaggacaacttgaagatttgggtcttgttagtacagaagcgaaacgtggtagaaatggaggaactgttgtcgtgtttaatactgatattttaaattttgaaccaactgataacccgattacttcggagacaaaggaagctaaggagattcgtgaacgtgtcttcccaaaagcaccaactccgaaacctaaaagacggtaccgtacaaaattagagattgcagaagctcgcattttagaacaaaagcaaaaaagctttgaagaacgcttaaacgacttacttgaacgtaccttcttggatagagacttttttgataatttcgaagaacctcgtttgtatttccaagggtatttaattgcacaaatgtacaatgcttatgcagttattttcccaaagaatagacatgagttcttcaaagatattgatgtgaaaaaatcagaggaaggtttacgtagtatgaacaaagctaaatcatacaacgtgttacctgctcgttttgtaggaaccccacagtacaacaaatttgttgaagtagctagatactgtaatgaaaataatattaacccattatcttatctaactgttcaatttgagcgtgcagagcatttagccgacattggtaaagctcgtgtaggggctattccttatgtaaacactttactgtgtgaagaagctcgtaaagcttattctgacaatgtaatgttttatcgtaaaatgcgtaatagctttaacttattcggtatgagtagtagttctgttccgtataaaggggctaaatatgagattattgtagctctacgtactgcgtacgaattagatagaacaacaagagatacgttcaactacttattagatgaattagctagtggtgcacaacaatcagtgaaacaagcaaccttgttaggttactacaatactactttaaatgctttatcagaaagtgagttagtagacgaagaccaacaattaatcagagatttcttaaaagagcaagtattgttatattcacgtaagaactcattgagcagtactatctatgctttagctttcccattacaaattagcgctgttaattcagttgcgaccctaaaaggtcttgacaaagagatgtattacacttatattggtaacatgtacaaggttacagatgttaacgatgatgaatacaatagtttcacggaacgtggtcgaacaattgatttctcttacaatgctaatgatactttctttagtacaatgcgattaatcgcagattgtaagggtctaggagttccggcaggtaagctagggagcgccttacaaaaattcggtgaagaaaaagttccgttagatacttttggtatgttagatattgaacgtatctatgataaattgattgattcagatgagttagccaaagaccgatatattcaagacaaagatgcaaccatgatgagtatggttgtgactgacgaggggtagggagaaaagcagaatgagtcaaattcacaaacaaaccatttataaagccattagtgaacctttgttcgcaaaggatgtttttagtcgattaccaattgaagattttaaagaggatggatacgacatgattgtatccaccttaaatctttattatcgtacacatgatgctccactagaggaacaaacgttgttaactcttgtggaagacaaaatgttgaaacaaaataaaagtttagaagcacagcaagttgcttttaacttagtaagtgacctttacaaattagaggaagcagaaacagattcggaagcaattagtgaaagtgttcagaactatgtacgtaagactttaacacgtgaagctatcatggaagctgtaacaaatgatggagcattaggttctgaccaaaacattcagagccttatggagtctttgcgtggaatcatgacaatcgacacaggcggacatggagcagaacttttagatttctttgctgatattgataagaaaaaagaacatctacgtaatttacaacaaaacaaatatccaacaggtttcatggctattgatgctatctctgatggtggtttagcccgtggtgaggttggtatggttattgcacctacaggtggtggtaaaactacttgggcagtaaaccaagctagaaattatgttgtacgaggtttaaatgtattgtacattcctctggaagaaaaaattgaccgtatgattgttcgttttgagcaacttctatctcaacaaagtaagaacagtatcctagttgatggggagttaaacgaacagttgtatgaccaaattcaacaagcttacggtgcaggtaaagaacaattaaactgggggaacttatggattcgtaaatacaaaccccaagagctaactcctagtgggctatctcaattgatttctgacgtaatgattcgtaaagggcaacaaattgacgtagttattattgactaccctgatttgatgaagaaccctcattcaagtggtggtaatggagagtcggatgcgggcggtaaactatatgaagatattcgttcaattgcccaagaatatgattttgtttgttggactctatctcagttgaaccgtgctagttatggtcaagaagtgaagaatgccggagcaattgagggttcaaaacgtaaaatgaatgcggtagaattaatcttcacacttaaccaaacaccagaagagttccaaagtgggtttattcgtgcttatgtagataagttacgtaataacagcggtgtagcttatgataaaatgttatactttaaagttattccggaaacaatgacaattcgtgatgagacccaagaagaacgaatggctcatgcgaacttgttagaacaaacaatggaagtagctagggataactacaagaaggaaaacaattttacaccaaaggatgcccaaagtaaaattaacaatttaaacgcacagctagcgggaggtctaaaataatgaaacacattattaacttttctgattttcatatgcacttttttaaggacttctctaagccagatgctatttatgggactgaccgagcaaaagaacaaataaaggttcttgaagaattaatgaattacgctcgtgaggttaaaggagacgttttatttaatggagacctgtttcataagcgggtttctattgatgtcagaatattcaatatgatgttcgaggtatttagttcatatccagatgtaccaatcattatggttagtggtaaccacgataaggtaacgaatgctctagcctctgacagcgccctagaagcgtttaacgctttacccaatgtaactgtcatctctacaatggaaaagcttgtacgggacgaatacacgctctatggagtaagctacggggaagaagtagatgaaatgaaggaatggattgcagaggaagctaaaaagctagaccctaacacaatcaatattctttgtgctcatatcggtgttgatggttcttctactggacagtattctcatacacttagtggagctttcaaggtagctgacttatatcctgataattttgatattgttacgcttggtcactatcataaacgacaattcttaggtggactatctaatgtattttatgtaggtaacaccttacagacctcttttgctgatgaaggtcaagctaaaggctttatggatattatcttagatggtaaagaatggagtatggaatttgtcaaagcaaactataccccatttatgactgtaacagcagatacagtaccagaagacttaagtggagcatttattcagtttgttggtaacgttactgaaaccgaagctgttaaaaagcttaaagaagacaatgacttgtctaacttacgaattaaagtgcagaaggactattatgtacctccacgtattgagattacagcaggttctaccccagaagaagttgtacgagcattcactgataagaaataccctgacttacaggataaggctttagaatgtttacgtatagctacggaggtgtagaattgaaaacaaccttagaacgtaatagacaagaacatattgattatatactcaatgtaaacaaagaagttggtattatgcaagatgacccattcgttttatcttatttaaactctatttctctagacgaattatacgaattgagtgaacttgctgaacaaatgtataaagaatacaccgaagttaaacttttagataaagcacttaaagagatagaagaaattggtgtaactgcttttaaagaaaaacatggaatttaacaagattttaagcccagaatgttctgggcttttttggcatacacccttgacatgtaagtgcttgtaatgtatacttatgttagtaacagacatacacttacaggaggtaaaaatgttaaagtttaaacgtgtaagcgcaaagaactatctctctattggagaagtatctatcgacttagataatcgagggcttgtcttaatcgagggaattaatgacacgaacgaaacgtttcagagtaatggttcaggtaaaagtacgttgctttcaactgtcacttatgcactatatggcactacacctagtggtttaaaagcggatgctgtaattaacagacaggtcaaaaagaacatgtctgttattttagagtttgaaaaagacggcattccatacagaattgaacgttatcgtaaacatagtaaatttaaaaatacaacgaagttattccaaggagatactgatttaacacaaaaatctgtagctgatacagacaaaaaaatcttagacatcttcgggattgactaccttacatatgcaaatagcatcatgtacggacaaggaaacgtagaaatatttgctactgctacagataagggtaagaagcaaatattagaaaatctagctgatattggtgtataccgatatgcacaggatgtagcaaaagaaaaagaaaaagaagccaatgccttagtagaagaacttggtagacagcacatgactaaggtagctgagatagaaacattaaaacaagtttattctagtgcattagagcaatatgctaatacagaaagaatgattgttgctcggaaacaagagtatgaagaagccagagtaaaatataccgaggcagaagacatgttcactcaaatggaacaagaagtaacaccaaagattgaacaactaactaaagagttggaagcttgtgcagttccagaagatagctttgcaatatcggaggaattgcgagaacagcaggctaacctgtttaagttaaatcaagcaaaaactactacacaacaagctattaataaagcacaagtagatttgagtaacactgagcaagctacaaattgtcagttatgtggtgcacctctagatgcggaacatcggcaaaaagagatgttacgattgcaacaagaaattcaagagaaacaagctttcattacacaattagattcagcaattgttgcttactctgatttggaacagaaagctaaagaaaaacaggcaagggtacagcaagaagttaatgaagttgttacaaaacaacgcaatatacagtcagctattaatgaactaaacaatcgtttacgtacggctgaaaatgctgtagcacttacacgtaataatgtaactaatctatcaggagccgtagctcacttagagggtattccgaaaccagaatatgacacggaagcggaagctcgtattaaagcagaaatggaagacattgctaaacgaaaagaattagcagaacaagaagcaagacaataccatattttagcgttagaagtcttctcaaataaagggattcgttcagaggtgttagacctagtaacaccattcttaaacgaacgagctaaccattatttgtctactttatccggttctgatattgaaattagatttagtacacagacagaaaatgcagacggaagtctaaaagataaatttgatttagaggtaattaacggttctggtggagacacctaccaagcaaactctgagggtgagaagaagagaattgatttagctatttcctttgccatccaagacttggtacaatcaaaagcaaacattgctgtgaacctaggcttatacgatgaatgttttgatggcttagattctatcggctgtgaaaatgtgattaagattttgaaagaaagacagaaaaacattagcagtatctttgttattacacataatgacaatctcaaaccattgttcgaaaatgtagttactatgcaaaaaacagaaggaaactccttcttagttgaaaagaaataaggatggtaattacatgaaattatattcagtagataaagggcgtaaccttggaacggtactcgtcccaacaaatgtaggctacacacaacgtttagatttcccgcttgatacattgtttgattggtacccatgttgtccaagatatgattacaagtacagtgatacacgagataagatgtacattgtaatgattgaggaaaatgaaaagcttccgttacgttacaatgttccgtctacaaaaaaacgtgttaagtcaaaaacagcttgctttattacagatacttggtataatcaagaagtagctaatgacaacaagaagttatttagctttgctgaaaactatgacattgtaactcctaacaaagagaactatactctggaagacataaacaagagtattgaacgtgtacaggacattttagacatgctgtatacagttcaagaaaaacaagtagaaaaagacttgattgttcgagttggcactttggaaaaagaagctcctgattcagaagaattgaaggcagtgcatcaggaaattaaagaatacatgcagttagaccgagagggaaaagcttcacatgtattaagcttattgccccaacatgccgaagagttatatgcaaactttggagaagtttatacaatgttaaatctaatgaagaaagtagtgtaggaaatgttctcagaccttctaacaaatgaactaggtataccaaaagacattgaacacgaattgcgatataactgtccgttctgtgaaccaaatcatgactataaactatatgtcaaggttagtgatgatagtacgaatggattgtggatttgttttaagtgtggtcgtaaaggtaaccctatatcgtttgtaatggaatactttggtgtatcttttgaagaagcattagagattctagagggttatggttacagatttcagaataagaactacattccaaaagatgattcattaacggatgaagagtacttattgttactacttgatactgtagggaaacctaagacggtagaggaggaggaagaagaaaaactcacgccccctcctttaccacaaggattccaactattatctcaaaatctatacaatccggaagcatacccatttttagtttattgtcataaacgaggttttactttaaatgacattatccgacacaatattgggtatgtactggatagcacagtcaatcttccatcaggaagacagattaggttgaagaaccatttagtattccttacacatggtgacgatggacaatatcagtattggaatacacgtgcgattgctgatagctatataaagtcctttaatgcacctagtaaggatggagagtactccaagaagaatactatattcaatcttaacattgcatgtaaaactccacaagtagtcattactgagggggttcctgatgcactaactttaggagaatctggtgtaggtacatttggtaaacaggttacagatgcgcagattaatttaatacttaagagtgttactcctgagcaaccaatttatgtgtatctagataaggatgcaaagaatgagataaaaaaacttgcagagcgtttgtacgaacgacataaagaaacttatattgttataagccctacagacaaagacccgaatagcattggtaaagagagtgcttgggaaattattaagaaccattctgtaaaggcagacggtgtaggtataatcaaattgatgttataggaggtacgtatgagtaacattaagtatgaagtacattgggtacatcaccaattaggagtagacaaaacacatggtgtatttggaacactagataaagctattgagtccatctatgattggtggacacagaatgactacaatccaccatatgttcgtatgtggacagtagacggtgtaactacattggactacgggtttcactatatgttctataaaatcaaagaaataaaggagactaatgaattgaatccagtagttaagtttacaaagagcgagggagccattgccccaaaacgaggacgagaagctgatgtagcacacgacttgtttacagataaggatgctgtaattttaccgggaagactgggagcaacagtagttactacaggaattagaacagcttttgaccctaacttgtatggtctgtttatcaacccacgtggtggcatgatgaaatacccattaactctaggtaatacacaaggtgttgttgaaggagagtatcgtggggatgttggacttcctcttaagaatactttctctttacaattcggagaatatactaacgctactcgtgttttagttattaccgaagacggtaagcttgtagggaaaccagttaaagaagtacgtgaaagctacccagaatttgataagctttatgaagaacagctaactaaattaggtaatgagctagatttaatctatgacaatatatttactggtgtttctgaaacacatgttgttgcaggaactatctttattccaaaaggtactcgtttatgtcaagcatttttgcttccacgttacgctactaattttgttgaagtagatgaattagatgaaacagaacgtggtgaaggtgcatatggttcgtctggtgttaaataatggctagtcgtataccagatttaaagatgccacttctttatcttgtaggaagtgcttctattggtactcgtgagcgtggctgtgatgtaacagttaccttacgagacttttatgtagacacccctgatgacaagttagagcaactaataactttgacgtacaaagaagacaaaattgaaaattttacacgacttagtgcagataaatgttcatttcgtgttatactaggagagtagacaatgaaagaatcaccaagtgtaaaacttacagaaactcatacagttactcttgtaaacactgacgtacttaaagtaggacaggttattggctttagagttaacagtcctaagcaagtaggtgcagaagtagtagatgtttattccgaagctgtcggggttattgaacgtatctggtcagaacgaattgaggtcttaaacctgattacaggtggtcgtacagacctatgggcaaatacgtttgattggagagaaattgaaatactatcagatgcggaacatctgttggaggcgtataagaatggaatttgctgagtatttcaataaaatgcaagaacactatgcaaaaggtgaaactgttgaggtagaaaagcttgttaaaagcgatggttcaaaactagttacctatgctgagtttgaggatgctttagctactgtagcacaggttactacacttgctattgaagaagcatttcaagcacaggaagccaagtttggtcttgtactaaaaacattaagagaacaaaaagttatctcagaagatactgaaaaagctattcttgctgagtttaataatataaatgaacttatggaggacgacattaatgagtaaaaaagcaaaacgtgtaggatttatttctgaggaagatatgagaacatggacagagtatttagctacagggcatgttcatgataaaaaccatgcaaaacagttagaacgtttaagtaaacgtgatattagcttaggggacgtagctactgttgtagatttcttgtcaagacgtaatgatggttatatcactgctctaatcgaacaaaactctgttaatgaaaaattgcttaataaattgggcgtaacagatgaaatgcgtaatgaagcgaaagccgaatacgaagttgaattgaaacaagcacaggaagaaattaaaaagttacaagaagagctagctgaaaaactacaaaagggtgagtaatatgagcacacatgaggaattacagaaactcggtctagttgacgaacaaggtagcttaaagatagaagctagaaaaacaatggaaactccgttacaagcactagctgatttattaaacgataaggtatccagtgattctggggtatacgtaagcgactgctttcaaagtgttatgattcgggaggaaagaccttatcaagtagttaaggggttgcatgatattcctacgttggtattttcgggaacagtttacccattagacagactaacctgttatccagacattcataatattaactatcaggatgtaagtttatttaaacctgttaaagaagaacatgtagaccaaataattttcatggtacaaaacctttataatttgaacaataggaacaacaatttgtatatgcagtttaagagataccaatgtggaaaagttacctatgaagaaataatgaacacacttaagtctaatatggagttctggtctgtacctaattatgtagaatcattagttgaagagtattatgtgaacccacatctattcgatgttaaaacacctgtagagcaactaattgaacaagtagaacttattgagtctagacgtaaacgtgttaaagaaagggatgacgagagtacccatgactgattacagtgcagtaggaagaaagtcaaaatctaaaggtgctcggtttgaactagaaacagctaaaaatttatctaagtggtggggacatgactttcaccgtgtccccgcttctggtggcttacattggaaagggagtaacaatgttgttggagatattgtagctcctatagaggcaggatttccttttgttgttgaatgtaaaaaccgtgaagaatggactatagagaacttatttctcaataataaagaaataaaaaattggtgggcacaggttgttggggatgctaaagaatctggtaagattcctatgcttatctttacccgtaatcgtgctaaaacttttgtgatgatggcttacaacgaagacctcatcaaagaaatcgaagaccgtggttatcctcttatggtctctaatgtagagtatgtagacgggtataaagatacccattgttataaaacatttactactgtgttagaagctattacaagctttaaacctcgtaagagtcaaggggaagaacatctactccattattttaacccaaaagagtatgattggcaaaaatctggtcttgtccgagaaacaaaaaagatggaagaagcaaaacaacttgatgttgaggagtctttggacttacttgttaattcctatttagaaggagaaaaataatggcagaaagaaactttccagaagctattaaaacttattattcttacttacgtgttcctgatttaaatgaacaagtatccagtatctctattgattttgtagagaactggacaggtcaagaagaacggtatgtacttgatacgctcacttctgaaattaagcctcgtttatacagcttagaaacagcgtatatcattgaggacttttcactaccggaaaaagaagctgacgtaaatgtagatgaattgagtaaggaagtatcagatttatttaaaaaagcatctacagacttaaaagaagcaattgaggcatctaatgacaatcaaccaagtcattcagaagatactgaaccgattaacgattgaccaattagaagtcactcctgcgatggtagacattgttctcgaatatctacccgcaggattgcttttaacagccaataacgagggttgggatgcggtagagcctgacctgcaagaagtggttatttccaatttggaaaaaatgagaggagcatctaaatgattgaatcaagtaatgtaaaccatccaaaacactatacacagggaggtacagaagtaattgacgttattgagtatctaacttctaagtatcccccatcaattcgttattcattaggtaacgtgattaaatatgtttgtcgtgcaccgtacaaaggaaaagaggaagaagatttaaataagggtcattggtacttgaatcgcagtcagtcagatattactgcaagcgtaagtaaaactacgtgctctattcctacttttgacatggaagctttcatccaagatactgcaaaaggctatcgtgaagaacagcaaccattctttaaatccattatgtacatgttggatgatacggaaggcactcctgtgttccgaatactaaaccttgttgagcgtgaccttaaggctcttaaaattgcatagttactactaggtagtatagagttttactccttttgcttgtaaggcgttcctgtcagttatgttataatagagataggaaaactaaatagcaaaaggagtttaattatgagtagcacacctcgagtaaagcggttaaatatctataataccgaccgacactttaatataaacttaatgaaacgtgaagacattgcaaataaaattaaagtgaatcggttaaatgaaaaagaaattgagaaagagatggatgaactaagcgaagtatcggttgtcacaccagtgtggacaatgaacatgaagaatgaaaagtcctatctcttataccaagaaaagtatacaaatgatacattgatacagaaattatttaaacatgcaggttctgtttcttactatacagatacaattgtaccttattatgttattgaacagattgctaaaaatctaacaagtgaagtaatttatccaacaaaacctaaatatgaaaatagagagattgaaaatattcagctagcatttacggcttgtcctgtaaccattgattgtccagtagttattccagatgttagtccttatgacgttttatttgctttacaccccttaaaaacaagtgtagacaaagtacaaatttcatttccgtggctgtcagaatcagaaatatctgatagacatagacgttattaccataaggttggagaccattatgaggttaaagcaaaatataaatatcaattctttaaatatgtccagacctcactatccatctgggctatgaacatttggattgtttgtgatagtgatgaggattttgccaatgtcgattactatgtacaaaaagaaaaaaataaaagaaacgtcaatagagaacgtgctctccaacgaaaggagaagtccgatgagtaaagataaaacaatgaaccggactgatgttgcacgtgccatctctcaatatacaggttatcgtatgaaagacgtgttagctatcttacaaatggaagatgaggttatcacacaagcaatttcacaaggaatatcaattaaaaaccataaattatggaaattgaatattaagaaaaaacctgagaaggtcgcatgggatggcatttctaagaagacgtttattcaaccagaaaaatacgtagttaagtttgtgccactttctaggttgaaagaagctatagacacttacaatgaagagaatgtttagtcattctctttttttttgcccttgacataccttacaaaaatgctatactgaaatagtagaattacagaaaggggaagagagcttgaaaatactgttcttacaagattatatcagagagacccatgtacataacagtcagaatggacaatatgtagactataaacgtactgacatgggtaaaaagcttacaagtttacttaacgacataggtttaacaggtcgtgattatatgattgactacgactatgacctaattcctgaaccacagaaggtaaataataaaacaggtaaagttattaaatacaaggagcctgtattaaaactccggaaagaacctgaaaaacgtttattaaaacgattaatgaaaacaaaaccagacatcattattcctatgggaggaatgggatgtaagaacttattgaatagtacttctattacgaaagcacgtggtgttcctgtacaaaaaacaattactgatgaagaaacaggagagttttttgatacatggattttaccaatgtttagtatggaatacttgtcaatgaatcctaatattgagaatttggtaaaagcagacatttctactttatctcgttttattgcagagggtgcccaagcattcgagccaaagaaagttgaatatgagcttgttatgacaattgaacgagtgaaacaaatctttgagttcttgtctcggtttaaacctcttactgcatgggacttggaaacaaatagtctacgtggagatgtattaggtgcgaaaccactagttatgtctcttagttgggaagagggtcagggtgttacgattcccttagaacatcatgaatccccttggaatgaagaagaactagctattgtatacaatcatttacaagcttttgtagctgatgcacagcaaccaaaggtaggacacaatatccagtttgatattcgtttcttaatgaacacaaaagggtttgcttattttgagaataaccgtgatacattgattggatattacttaatcgtagcacagaaaattgaaagctctaaacgtttgtcagaccttgcttatgaactaactgatatgggcggttatggtaacccattagaagattataagaagaaatacaaggaagactacattgctcgtaagaaagctgaaattgatgagttaaaagcttctgagaaagcacgtgtagagaaggagtacaaactagcacaggctaaatacaaagaagaagtggcaaaagctaagaaattaggtaagtctactaaatcaattttgaaacctgtaaaagaaaaagtagttgttccttctaagacagaagttaaaactgtgaatgaaattgatggtggggactttaactatgattggattccattagaaattatgcacccatacgcaagtggagatacagattgttgcttacgtatttataacgtactataccaacgaattgctcctcatgaaaagattctagctctttggacagacttttatcctaaacttacacggacacttgctcatctagaagcagaaggtatcttcgttgataaagaatatgcgaaagttcttgaaaaggtatatgcggaagaggaagaacgtcttatcgaagaattacgtaagttccctgctgttaaagagttagaagcagagcatatggcactttataaagcaggtctagaagaatggaagaaacccaagtcagaacgagacgaagaggttgccaaacttcgtgataaatataagatttctgataaggaaaacaaagttaagttcaatcccggctctgctgtccataaaggaaaagtcctttataagattcttggtctaacactaccttatgacaaagagtccattaaagaaaaaccttttgataatggtgttcctgaaaacgaattaacttgggaagactacaagacagataaacatgctttgggctatatcgcagagcacgatgaagatgcaaaagaattagcagaaatgctacttgaatactctaaagtaaataccttgaagaacaactttgctcagaaacttccgttactagcttcaaacaaagatggaaaagtacatggctcctttaagattactggtacagaaacaagccgtttatcttcaaaagaacctaacatgcaacaagtaccgtctaaagttggagaccctaatcgttttgattatacgtatccaattaagcgtatgtttaaaacgagttttgagaacggggctttattacagctcgactactcagccctagaaatgcgtatcctagctttagtagccggagacgaagcgatgacccaagctttcttagacggagaagacttacacaaatcaaccgcttctattgtttggaaagtacctgtatcagaagtatctaaggatatgcgtaagaatgctaagagtgttaactttggtattgcttatggtgaaacacctttctctattgctcctaaattaggtgtaacaccagaagaagctgaacgtatctttgaagactactttgcaaacaaaccacgtattaaatcctttattgatgaaacacatgagtttgttaaagaaaacgggtatgtagatactttacaaggacaccgtagattgattcgtgatgcgttctctaaagaccgtaatacattcaatggtgctttacgtaagtcagtaaacacgattattcaaggaactggtgcatacttaacaaacatgtctctggtgtatattgacgattatctaagaactaaaggtatgaagtctcgtattgctattacagtacatgactccattgtaattgattgtcctcgtgaagaagtagacgaagtagcaaaagtagcttgttttatcatggaaaacctaccaattgatttcttaacaattaattggaaaggagaacaaatgagattccctattgtagctgatgtagaaatcggagaaaactacaatgacatggttgactatgatgcagaagaagtgaacaaatttgcttcttataaaggatacgttaagtattacaaagaccaagctaaatttgaagactataagaacgcaggtatgattagtgaggaacaaatggaagccggtattaatgcagttaaggcttctatagaacagtacaaactaattgcgtaagtcttacagatttatttaaaaaaagttacaaaatgacgttgccctaacttgtaatgtgtgctataataatagagcagacaggttagggaatgtctgtaataccggaaaggagaataagacagtgtgctagacttacgagtgaacgaccttgaatttcgtaagataagagttaccgatgagaacggtgaaacaattgtgtttgaccttacagaggaactacaggtaaacgagtttagtgtacgccaagcgttcttagaacaaccggctaaatacacatattggacttctttacttgaacgcttacgaatgtaccaagagaactacgagttacaagctgaaaaacgtaaagcagaactgtatgaaccttctagaaagtctttgattgaacaaggtgtatctaaaccaacaaaagaccaaatagaagcacagattatgcttgacgaacagtattatgctctgagacagaacataatcagtttaacgtttaatgttagacaagtgcaatatgtagtaaaagcctttgaacaaaggaaagacatgttgattcagtatggtgcagacttacggagggatttcgagtatagccagaaagtgtctatgccagacccactaaaaggtcaaaggacaagttataacaatccatataacacataaccttagaacctagttgaacaacacataattcgagaaaccaaaataaaaaacaaaagaatggagaaattaacgtgaactttcaagaacaattaaaacaacaacttgcccaacaaaaccgaggagaacgtgccgaggtagactatccttccaatcatcttaaacacaaagagctatttattccaaaagaaactaatcaagtattagttcgtatcttgccacctagtgtttctggtgaaaactacaaccaaatggttcgtgaaatctttttacaagcacataaccgtaacggtaaagaactaaaattaaatgctgtcttatctgcattccctaacgtagaagacccattagaccaagcacttattaactggaatgcacaaaatcgtgttcctaacaaatggaacaaaaatgcaactccaactaagaagtatcttgctaatgttatccaattaattagagacccacaaacaggtcaattccaatatgaaacggatgaacaaggaaacttgatggtacgcctattcaagttatctcattcagcttgccaagctattaatgctaagttaactgatactatgttaacaccaaactttaacccagatgttcctgattctgttaaacaatacagcttcatttcatctgcggaagcattcccagtaatgattagcaaacctgctaaaggttctggtcaaatgtcttacggtgttgatgtttatagtaacatgcctctaggagctttaccacaaggatgggaaactcaactagaagacctagcttatcaagctacaccttcatacagctacaataaagagtacattgattactttattgatgtagtaaacggtgttgaacctgtgagccaagcacaaggtggacaacaagcacaaccacaacaaggttaccaagctcctgcaatgggacaaggctttgcttctgctccacaacaacctgcttacaacatggcacaaccacagcaaccaatgaatactggttttaaccaacaacccgtagctccggttcaaccacaagctacaaacatgggtactccttcatttggtcaaacaaacatgggaacagctcctacaatgaacggtggatttgcgcaagcgccacaacaacctgtacaacctgctccaattgcagaccctacgggttttcaaatgccaatgaatcaagcaccagtaactgacccatctactatttcagatgctgatatgccttttaacatgcaagcaatgccagatgtaacaccgcaagcaacaagtgttcctgagcaaccagtagttgcaactcctgaaccacaacaacaagctcctgtagcacctgtagaaacagctacaaatactactttaccagatgttgatagcttgctacaacaaatgcaaggttagtaatagaggaacagggggctgaaatagccccttcttctatttaaatttgatatgtaattcattactaggaggaacaaatcttggcaagaaaaagacaaagtgaaacagtagaagcaggtacaattgatttaacaaaagaattgggcttaacttcttttagagatacaaaattttctagtgtagcagaccgactacctacaatgattcctcaattagactacatcttaggcggaggacttccatttggacgtatggtagaggttatcggaaagaactctagtggtaaatctacttttgcagtacaccttactaaaattgctcaattattgaaggtgccaacattgtggattgacgtagagggaactgctgaccctgaccgtttagctgaactgggagtaaatcctgatgcaggggatgtattcatggtagagcctgctttgaaaaaagacggtactaaggatacaatgacagtagaacgggtagcagaagagctacaacgtatcctaccagtaattaataagacaggtaaacctattttaattatctgggattccgtagcacagaccgccgctgaaaaagaaattgaacgtggtgtaggtaatcaacaaccgggtattaaagctaaagcaatggcacaattctcacaaatcattgcacctttaatgactaactcgaaagcactatttgttgcaattaaccaagctcgtgatgagatgggtagtatgttcggaggtattgattctccgggaggacatgcacttcaccactgggctagcttacgactagaagtccaaaaagcaagtaagattgaaaatagtgaagtaaatgcctttggtgtagaagaaaaatcttatatcggacacatcatgcgtattaagacgttaaaatctaaagtatctagaccacagcaaaaagctgaaatgtatctaatggctgattcaggtttagaccttgaagaaaacatctaccgtgcatgtttcgcaactaataagcaatatggattcattagcggtggtgcatggaaagcctacacaacagatgcaggtcaagaaatcaagtttaattctgaaaagaattgggtagacttcttgaaatcagaagaagggcaacctgtacgtgatgaactatttgctaaaatgatggctcgcagtttccctaatggatatgcaccttataaaaatgaagagattgatatttgtcaaataccattatataaatacgttaaagattacatggaaactcataaagaagaagcacaacctgtagaagagcaaacagctcctgtatctgcaacagatgtttcagacttattagaccaaattaagtaaggggcgttatgcccctttttataagagatggaggaaacctaattgcgtaaaactacaccagttaacaccgtactagaagccttagaaatgtttcaacaaggaacagcaactacagaggttcgtacgcctatttctttacaatctgtacgtaaacgtttcttagatgctaaagaagcaggaaaacgtgtattgattgaaaactctgatttaagtagtgcaaactctgttgttgttgatattgactatgtaggtagccgttggtgcttaggttatcaaaaagtattgtactttggagaagaggtacgcattcctcatactatccacttttgcgatgtatatggggcttatggcaacgaagcacaaagaagtaaacggcaagtgaaaatcatttttgaaggagagaacccttttgagtagagaccttaacaaagaggaacgtgagattagaaacggaaatcgtttcattactgaggttcacggtaagggggtctttccacgagatgttgatagactgtaccaccgttatgccaacttacgttacaaggtctataacactcataaagactcttttcgaagtgaagcctcacgaaaagaactaagaagttatattgatgaacaatttatcaagttaacgaaagaatatgatattaacggagaggttgactttccgggatatatcaaaaaagctcttaatctaagagttagacatagctttgttaaaggacgtttccgtgatagtgctcgtgaacgtctaggagcagaggacaacgagattgaaacattactaggaacagacacctcttctcaggaagcaattgaagatgctgaactaattgatgatttactatctaaagcgaagtttagccctgtagagttagccgtattcagctatctactacgaggtaaggtaaaagatgctaatatcattaaagaggtgtcagcgaagtataaagtatctcaaaagtctgttagagatgcaatcaaaaacgtgcgggagtacgttgcgttaaatcttaaagaccgatagaattaggtaaaatcctccttgtgtgtatgctatattagcagtagaaacacaaaggaggatttttgtaatggaagaacaaaacaacactggcaaatacgctccatttattcgactaattgtaatgggtatctccttcgtggctactggtttaacaactatgtttggttgggaaccactaccttttacagacgaacaaatgaaccaaggtttaatgcttgtactttctgttggacttgctatctataactggtacaagaacaacgctgttactaagtacggtaaagctaaagagcaagcaggtaaagaagttgtcggaactcgacaagacttcaaacaacaaggctaagtttgagggggtaaaacccctccttagttgatattaaaggagtatgacaatgaaactaacaaatttaagtgctagtacactacccgaattaaacgggaagtttcttgttgtagagactctatcagacggatacacaggaaccgtaaacggtcattataactatgaagttgttactaaaggtgaggactatgaaatctatcccacactttggaacaacgaaaaagcgcagtttgtaaaagctgactaaatggttgtgtatacaaacggagatactgtattctatgtaacaagaacaacaaaagacccctataaccatgctgttatcagtgagttaatcgttgaagaaggaatggataaggataagcgcacccttcaagctttccgactattcgcagacgatttattctctatcggaaactataacgtgttcttaacacaccaaattgatgtagtagacagcccaaataacgtaaaagttgaatcagtttctttagataaaaaatccggaacattatatgtgggtgacacagtagaactaactgcaactgtactaccagaaaatgccacagtcaaagatgtaacattctctgttcttccggaaggaattgctactgtaactgctactggtgccaaggcaacagttacatgtaaagcaaaaggttcagctaatgttatcgtaactacattagacggagacaaaacagctcaatatgctttaacagtgaaagaacacgtttcagtttctggtattactttaaataaagaagctacttcaattgttaaaggtgctacagaaacacttgttgcaacagtaactccaccagatgcagaaaacaaagctgtaacatgggcatctgataaacctgccgtagctaaagtagaccaaaacgggaaggtcacagcagtagacggtggtacagctaatattactgcaacaacagttgacggtaagaaagtagcaacttgtgttgttacggtaactgtgcctgttacaggcgttacactagacacgaatgctattactttagaaattgatggtacgcaaaaattagtagcaacagttgctccttccaacgcaacaaataaaaaagtaacgtggaaatccgataaatcagaaattgctactgtagaccaagaaggtacagttactggtgttgcagacggtacagctaacgtaacagcagaaacagaagatggtaaaaaagtagctacttgtgctgtaacagttaaccctgcacaagcataatatattaggaaaagaggaatactaaaatggctaaagaaattgcaaatattgcagacctattaaaaccaagcgtagatgctgttgaattggatggtaaatatcttgtagtacctaccctatcagatggatatacaggtacagtacagggtgcttacgcttatgaagtgaagaaatcaggaacagactacaaagtgagtgaacttatctatgataaagacaagaacacgtttactcctgcggatgctccaattatcatgacagatgacgatacaattttcttcgttactcgtacgttgattgacccttacaactacccagtaattagtgaggctacagttaaggctcatgaaattaaagaaaaacaagtacttcaagcatttattgcttttgcagaagacagattcaaactaggggtatacaacgtatttttagcagatgacccttatatcttgcaagacaaagcagaagactagtttgttctagtacaaaaaaactgtacaaaatttaaataaagtgttgacgacttacacctctcttggtatacttagactatactaaataagagaggtgttttattgtggttaaagctaaaaatcctgtacaaagacgtagaggaacttacaatagttgtgatgtgttagttgaagaagagaacggtttcttttactatagtgtacttaactcagatggtaaagaaatcataggtggctttagggataaaggctcccaagacatatctacattttacaactacttgcttaagttagtagatgactacgttaaatgtccagagggttttgttgaagatgtttaaacgtaagaaatactatgtagtccaactagttgttcaaccagatagtaagccttggtacaggtcaatacttgtccaaagagaagacgggtatctgtttacagaaggttacaacagaaaatgtcaggtagagccaatgtatacacgtcttggtatgaaatataaaaaagtttttactgaaaaagaaatatgtgcaatcaacccagattacatgtattttgcagtggaggtgaccaaggatggcagacctattaatgataactaaaaagaatgttcagggttatgtattaaactacttatttaagcaattagctgtgaaaagtgaacataactacacttgtgagtttttagataagtttaacttacctgatattaaaaattatgcgaataaagcagatgtactaattatctcaggcttccctttttatgagagccaacgtactactgtggatgaagcattacaggtaatgaacaatccgtttagtcaattctttcacttagcaacttttggggatacctatagcaacgagggcagttttcattcatatgtagacgaagtaataagtcctgtaggtaactttccaaaaatagttgaagaattaaaaaactttttgaaatttgctgatgcaattcagcatctacttttaagtgatatggaaagtatcatcgaagcaaccgatgcgtataatcgttatgaggtaacagatactattctagactgggtttctcttgtagaaacgtacagagagcagttatacgcaagatacggagtaggtacagacttagaggaaatacttgataaggataaaaccttagtcaaagcattgcgggagaaaaaagacgattatatcaaaagaacacttggcagaacatctgcacaggtaatcaatggtacagtcgtatgttttacttacgcagaggaatatgtaaatgaggtagcccataaactgattgagttttatcaatcatacaactatacaaaagtagctgtctttgttggacgacatactaaaggtgacgatatgttcagcattcgaacagcaggtatagatgcgggagaacttgcctacaaggtaaacaggggtagaggaaaacctactactgcaactgttttcttaggtaattcaggtcaatccacattcaacgcattacttaacacacttgctcaaattgtataacaagtaagtgtgttataataatgttaggtataaaacaatacacagggagtgtgctacttgaaaaagaataaaatgctagaagacctaatgaaacaattagataacccatacgtaattggggcaattattgcaggaactttgcaacacgactttaatcgtatacacgttagcaaatataataaatttgctcgtgaatttggtttagaccgagaaaataaagaaagtctagaagccttgattgaccactttgattctgacaagttactgaaagaattgtacatgtcgagtattgcgggagagattaacgtagatatgcttcgttcgtttaaagataaaacgaagaaatcagcttttcaaactttatctccgtttgtagtggacaaccaagcagttttagctcgtaatcgtgagttcaacaagattcaacgtgagggtgcttacttagaccatttaatcgaaggattgaaagagcacttatccgaagaacttgaaaatactaatacgcttaaatatattgaaccagaattacgagtaaaaggcaagccaagtgaccgtgaaatgattctatgtttgtctgactggcatattggagctttcgttaacaatattgatacaggtggatacaactacgatattttccgtgaacggttaaacaatctattgtcagaagcttttcgtattgtaaaagaacaaaatattcgaacagtacatgtctaccatattggagacattatcgaacatattaatatgcgtaatgtaaaccaagcgtttgaagcagaatttcctgcaacagagcaaattgctaaagggattcgagtattagttgaaacactaaatgtactagctaaagcgggtctagatgtaacatttggtatggtaggtggtaaccacgaccgattccaaggaaataaaaatgataaaattcataatgataacgttgcttacttagttgtagaccagttacattttatgcaagacttagggtctctacacaaaaatgtaactttaattgataacagacaagacgtttacagctttaaagacactgtagcgggtaaacgtattaaagttgttcatggagacaatgaaggtaagaaagtagacgttaagattccaaaacatattaaagaagaagttattgagtatttaatcatgggacatatccatacaacacgtattattcaagaagactattcacgattccatgtatacgttgggtctcctatgggtgcaaataactattcagcagaaaacaatctaccaacaacaagtccggcacaattaattatggtcttagaccctaaagtggatagcccacaatttatgccaatctttttgtaggagagtgatagaatgaacccgatttactttttattatctatcatgtatgtattcgagtttggacaagcattcttgaatacgaaacgaaaagaacgatatatgattgaagatggtggagaacctcttcctagaagctcttacgtgttcttattcattcaatatgtattgcgtactcttttcgcaatcttgcttatttttattgtaccggagagcctacaattcaacgtaggaggtattactgcctttatagtagttttgcttatcattccatttatctctcggttcattgaagttggtattcgggtattgattattaaatacttgcaagccaagcacataaaacgtattaaagaacaaggggacgaaaaagagactaattagagtctcttttttgttatgttatattaagtattgaggtgaaaagaatgaaatatacagaaatccaagtaggtgacggacaaagcaccttattagatgtaaaaagcaaacctgccttaattcgtagaggcacattaacaatgaaagttaaatcaagagatagtctaatcagtaaggtagaagagaaacctgtatatattgttgagttagcagaagaatcctatggtacaagcgttgtttctgtttttagtgcagtacaggagggaagcggagaccatgtagttgttcagaaggcttacacagagaatatcactaaaccatcattcaaaggaactacgtttttaggtaaggttgctcaaaaggttcatgaaaagagcttgaaaccaaaacgagtggtaacaactaaacctcctgtttttctagcgcctgttgtcatgggagtagacacctttacacaggaacacggactagggttttatgaacgagaaccagataaatttgttatgaaagacgggcatcctagcattgagtatggaaagaacacaggagtctttatttgcttaaactctattaagtgggataaagcttatgtcaatgcaggacaactgattcaagactatgtagcagacaaacaactatggtttaatctgggaggaactaaaccacaatttaagagtgaagttaatcaatgaccgataaccgtttctatgaggcagacatacaagagttaatcttgaacaaaaaacgtatttttggagacattggggaaagtgctattgtatttgagaaagcagttatgagagggaataccatttgtgattgtttaatctttacagaaaaacgaggcgttattggtattgaaatcaagacagaacgtgattcaactaaacgtttgaataagcaacttaaggactatgaaaaagtctgtgattttgtttatgttctttgccatgatacacatgtaccaaaagtggaacagattctaaatagatacaatcatagacatgttggtattttagcttatacggagttcatgggtgaagctatgttaggaatatacaaagaagcaaccccttcaccaagtaaaagcgcttatcatatgctagatattctttggaaagaagaaattctaaagatgttaggtacattcagacattacggtattcgagtagagactgctacaggaaccaaatttatgcacacagctaaccgtagtggaggtgtgagtggtctttatacgaagtctgcgaccggtaggacgatgcgaaagccagacttgataagaaaccttataaatcgtgtaggaggtgctgaggaggctactagggtcttctgtgacgtgttcattcataatagacagcatccagagaaagctattaagttaagacactttaaacagcaaccaataaggagtgataacaatgagtaaacaaggactaccttttggtacttgggagaactccgcaggaagaaactacacagggttaggtaatacagataatggacataataagaaacgaatgtccacaagaggatattaccacgtagctctgacaaaagaatataggggactaacagagagggactttgaactaaaacttgaatatgggaaagaccttgtttctcaatatacaggtgtaccgattgacatgcttgttcttcggaaaaaagcagaaaaacaaacactttcgtctatagatagtgtatactatgtttgtcgaggaaaagaacctatcggtaagctgtctgtaagggcacagagacggtttaaagaccttggactcacatttgtatacctagagaagaactacgcccctaaagtggtgagaagggtgtctaagggacagcgtagccttctgggacaaacgaaatcagataaacgtaaagcaaaccgaaaacaaaagaagccaaaaacaacaaattaggaggacaatcatgctaagtagggggaaacaagttacacttagaaagttaaacaatattattacaaataaggagtacatccttataggtgctcgttacacgaacgattctttagaacgagatattcctattacaactgtaattgacgatatacttatagatttgaagaaagagacaatggcaggctgtgttttctttagaccagtaggagatgcacaaagaaatgcgctatctctattaaaagatgcgtgtatgcactttggttacggagaatttttagacgaagctattgaacgtcctgcattgtatgcggggctaaaagcaaacgttatgctacctgacacagccttctcaaatattcaagaaattccattcaatttttatttcacagaaccagaagtattttgtgaagaagtaactatcaagggaagaaaacatattcagtacactgtcttagatagaatcagtttagatgatgtacaacatgtagaacaatctcttgttgttcttttccgtaaagcagaatatgatggagaaaccctgttaggtgcttacacggatacaaaattaacaaagacagaagcaatcaaaatccttcaatttgttagtaatggttccttacttgaacaggtagttggggcagttactgtattctcagataaagtagtgtctacacttattcctttgtttaatgatgtggatataagctttatgaaatcaggagaaggaaaccctgttgtctctattacagcagacacaggaggcattgcctttgatgaaaaagatttggacggtatgtctattgaatctcctagtttcggagcttaccgtcttgtgttacatgtagggaaagacaccgtaagtattttaattggataaattttttgtaagggagtcaaattatatattgactctcttatttttgtgtgctaagataagttcagttgttgtacaaggttacaatgacaacatgtacaggagggaaagaaatgagtgtagcatcaagtttagatagagctgatgaatggttgttgtcgcatttgtgtgataagcgtttagaatatttgtctcaaaaagaagagttaactgcaaatgaaaaagcagaaatattactaattcaagagcttaatatgaaactaatctgtaataccttacaaaaagaaacacctgttcaaaacgtacagggttctgacgttactagtggcttattaagcaaagcttacacaaactctgttaacattacatcccaagaagcgtggtatacatctttgttgaaacgtacgcttgatgttgttgatggaataccttgtgtaggtaatgtcactgtatttgtggactcagatgagattagtatttcgattatgggacacatacgacacgataatgatttaacctgtgatgtctacgaaatttcttttgaaaaccttggaggtatcgaagattttctaattcatgttgagggagtagaaatagctttaccggactatttagagtttattaccgaggaactacctgccattttaaaaaaatcattatgaggagagagaataatggatttaaaacaagcttacaactatgcagtagaacatttaaatgaaaatgccaaaacagaaagtgaacgtatctatgtattgggtgtcttccaactaggaagccgatatgccggatacgatattgaatcaagtgattatgattttacagtcgtttacatgccgtctgcttatgatttattaaaccgtgagtatggacgtagcaaaattaagtttgaacacaatgattatgaagtggaaatgtcctttatggatattcgcaaatacctaaatcgtttattatcaagctcactagaaacattacaaatggtgtttgcaccatctagcatgagttactatgctaaatttggagacgataacctatcattgcgagcagaagaacttgtagatttcatgttaaaactacgtgataaccgtaagtcttttgtttatttgaacacagataagctatacgattcaatttcaggaagagcaaaatcttctatgggtaatgctagcattagttacacaaatgatgaatatggtcgaacagtcaagtatgcgattggtgttgaatacatgcaagacctacttcaagcattatactacaatgaagacattcgagaaggtttgactgtttcacctatgcaagcacctgtttataaggaacatcgaaacaatcctagctatgaaattgctcgtttgtaccattctcgtgctgttaaccttattgagaaaatggtcttaaacaaagcagtggttcgtgaaactttacgaaaattacagccgaccgaagatacaattaaggtagtaagagaagtatggacagaagagtttgtaaacattatcttgggaggttatgacgactaatgatgacaacagcagtaaaagaaagaacattagatgaaatcttaaccaatcctaagaaaccgatgacagagaaactggttgaagctgaacaactaatcaagaacagtgagcatgtttatgactttgggttaggtacaattaaagaaactatggtgatgtctggcaaaaactggttagctagtcacttatatatcaaagaagttactacttatggatttatcttgcaagccgttgtatacaaacagtccttagttgagcgggctgttactaacgatgaaggtgaagaaataaaacctgcttcttatgactatgagctaaaccgtgtttacgaattagagtacagtctacgagataagtatactagactacttaaaaatggtagccctttgaaattctcagagaacaacatcaaaaacatgttttctggtcaagaaggtgttattcaaaaactagattcatgctgtaacaccgagatgtactcttctatgtatgacgtgtttagttgtattggaaatgaatcagtaccccaagtagctcgttttcttgttagatttatgcaattgaacgtggttgaactaatttacaaaagtggggtgcctattccttttgctaaagactttgctagagaccaagcaaagaaacttgaaaaaggtggcagttggtattgtagcccagaacctacagctaagtgggtagattgtacagctacctctcctgtaaaggttcttaatattccaaagtctttgtttaaaattatctgtcaaggtgatattaccttccgtagatatgtttcaatgtacaaagcaatgcgtaaagcagaaaaaacgggttttgaagaggaacctcgtgaggaatggaacagggaactacgaatgtatattaaacccgaagaagacgaagctattgtacaaaaaaggaagaagtacaatgagaaatgtctaaaacgaaataaacagggaatcattcgagcttgtggtgcattgtatcatctgtttacctttgctgtggaactagataatgaatatggaattgaaaaagctagtaaattagcttcccatgagtttgaagacatgttatctagggaagtagagcctgagtctatagataacttatcgaataattcagcggtttgtattgccttttctctaggactggaattgaaccgtgttgcccgatacatgtactatcaattacatgtagaacaaggatttactaatggttggtatgactcaacttatcgtgactatctacgtatgatgcgccaactagaaattgcggacaaaggtaactatcctaaatcactgaaaacagtacatgatgtagctgaaatgaatactagaatgattaaggacaaggaattagcagataattttgctgaaaaagttaaacattaccgagaatgggaagacgttaaagttcgtggtagcaagtatattatgcgtacacctgagagtatagacgaccttgccaaagaaggttctagtctcagtcactgtgtattcagttatgctcgttcagtagccctaggagaaactacgattatgttcttacgtactaaagcttgtccagatgatagcttggttacagttgagattaagtacagccctagccgagaatgctatagaattgtacaagctcgtggtcactctaatcgagcattaacgactgcggagaacgagttcttagagaaatggtgtaaaaaatcggaaaatgtggagagaaaataggctattttaaaatgaaaaaatactactagttagttcattttcttaagttagctaaaacgattcatttcaaataacaattttccacctacaaatgtttcatatataattcacagaaaaaacacaaaaaaccctacagttatgtggggttttcttgcgtttcatttatatctgaaatttaacagttatgtgtgctatattaacagtagaacctaagaagggcgggctttatccgtgttcttagaatatagacatgttgaaggagtttgtatttgaaatggctaaaaaagacttaaataacagttcagtattgctgaacttatatcataataaactattagtatccaaggttgatgaagccctagacgagggcaaaccttatgattttattattgctttttgtaaagagaaatttgactttgaaatcagtaaacccgcattatctcgttataaagaaaaacgcagagaagcaatcgaacagggtgtagaccttgaatctctacttgacaaaagacgaaaatctggtaaagttatagacctaaaaggaaaagaggttgaaactctaccaaacacgaacacgtcttatgaccaaacatttaacgcagtagagcaaatttataatgacgttgaagtgttagacactatcattcaaaaaggctttgctagcttgaaagaagtcgattatgtagaagcacctcttgccatgaaagctatcgaggttaaagcaaaagttacaggtaatcaactgcaagggttaagtctagtgggattgcgtgaactaagattacgtcagtctgctaaagaacaagcaatgaccgaagttatcttacgttttatcccagaggaacaacacgaagaagtttaccaagcaattgaagaagcagaagcagagttctatgaaaacttagacctaacagcagaagatgcacgtatcactagcgcacttgaacaagcgggcatgaacattatctaagggggctattcaaatggcagaaaatctagtggaagtagactatagagggctgactttacaagaagcacttcaagcgctactagacaaaaaagtattgctagtcaaaggactagaacaaagtcggaatttagatgtattgatacgtctttacaccgaaggagtcgtacctgttactcaaatcagttatgatgttgttcctgctgatggacattggagagaagaatactggcagatatttgatatatctgttaatgcactaagtacgtatccgtgttacgtgtatgatgctgaaacggctaataaagcacctaagttcctgattggaacaacagtttattacaccagtaagatggatagcactcgggattcagctattgttattggtttgtacaaagatgaagaaggtaactggcactacaagttaagtagagaccaagaaatttatgcagagacagagcttacagcagacaggttgtaagcctgtctttttttgtaattaaagtattgacaataaacagtaagcatgatatacttatggtataaattaataaggagagattcatatgaaagaagaaaagacttatactttagaggaaattagagaggaaattagagaaaaagaaagaaaagctaaagaattagaagagttgcttgcaaaactaccagaagatgtcttatgtgaagaatattatgcaatggaaaacgacatgttttatgcttgggaaaacggttcttgtgaacaagtgcagaagttgttgagtaaacataagtataacttagactcaattcaattggttcacgacgtattctatacactgaacaatttggtagaaggggaaatagaatatggaaaataagtagttgacagtactagtacaagatgttaacatgtttatgtacaagaaaacaaatcaaggagagatgtacaaatgaaaccattcgaagacatttttgatgtgttaaataaagcacgtcaagacaaagacaaggtaacacttacttttattgaaggactagacaatattgctagacttcaaattgaggattcttctgctacagcaggaatcactcgttatgtaaagttctacaacaatgacatccgtaagttccggtacgttgaccaagctgactttgaagaaatgtatgcaggcttagaaatgaaaacaggtaaaccaaaagaagaaacaattgagtttccttctgaggaagtaggaattatcagtgctttaaaaatcttgcaacaaagtggtgtctttagtgatgaagacggaatgcgaactttaggaattaacacgtctacattgaaagatgctcactatatcttacagtatattgagcctgcaattgaccgttacttcgaatctttgaataaggatattgaagaattagaccgtgtaatgattaaccaatcagatgaacttaaacaaaaaatctgggaaagctttgtatttagcaaagataatctaagcaaaatgctagatgactttgaattggcaactctagacacgttcccaaatgtaccatctaatttgattgttgagacttgttcagaagtgaagaaaactcttgaagggttattgattgaagatgcggaagaaaatcctattgagtgtcatgattaccttgttcgtggtttcgttggtgctgttatccgtattgaacaatttattatttctgttgcaacattaccttaccgtagaacagaactagaacttagagaatcaagagaagcttatatcaaagagcttgcttcaaatctatttatctttgcagaagctattgctcaggcgtatactagacttgtatgctctatcttaatggaaaattctattgatatgcacaatgctactgagtatatccaagttatggaaacaaaagcggttcactgggtaaaagaagaagcattaggcggaactatgttagctaacaatgaggaagacctcgttgagttatcccaagctttaaactctatgacactagatgacgtacgtgaaacccaagaagaccctgagaaggctgagtttaaagaagctttggaagaactgcttaatgagttgataggtgttttttcagaagacgaggacgaagaagaagttgacgaaacagaagacgaaaatgaggaagaaatgaaacaagccttgttagaatcattagaagcatttgaaaacctgttacgttcaattcaagcccctactatggaagaagaagaggaagaagacaatgaggtgcctttcgaaacacctatggtagacatggatgaccttcttggatacttattatcgggggaacctaaagaaaaagaagaacctgtagagctttcagacgatgcaaaagcagagtttgaagaatactttgcagatgaaatcggtgagttacaagaacttcgtgaaaaagggaaagatgctgtagccttatataataagattaatggggaactaccattaactgagataggcacaatggctatgaaaaatcttcgttttgcattatcaactctgcaaagaactttagatagaacagagcttgattacacgaagaaagggttacttgaatctttagatacattgagaggaactaaatacaatttctttgtagaatctattgagcttttaggagacacatacaagttgtataaaacagtaggtaccgggattgctgactatgcacatgcagttgtggaggacatggaagacacacttgacactgtgatggatattgactctgagacagattactttgttaaactcgcagttaagcaaattaagaaagacattaaagcattcgaagaaacggatgaatattctgatttactggctttctctttagcatttacacttgttgttgtcatgaaagactatgaaggaactgacctaagtccaatcagtttaaatgtaaaggttgaagactttgcttctaataaaaagccttccgttgttgtcgaagacgaagaagaggaagaaaaagaaggagctattgacttagctaaagagttgaaagacttgattcgtgggactgcattagacaaagacaattctttaaacaatagtgtagacgaagaagccctgattactgattataagaatggtgtctctcaaagagaactcacaaaatgttataatataagtacagggaagttctactcaattctacgtagacatggtatcgcagtagatagctctaaagtagctaaaaaggttgcacatgtagaagaaaacccggaagtacttgaacaggttcttagagattatatcgaaggtaaaacattagcttacatttactcaaactataatctatacaagaacggtttgttctatctactagataagtaccaaattccacgtagaaacaaacgttaacttccaaataactttaggcagtggctactatggtcactgcctttaataaggagaatatttgttggaagagacggtttataattttatacaaggcttaagcgggacacaattaactatattagaagatacatttgctttactaggactaatctttatacttataggaatacattttttagtagcagatacagttgaatgggtgaaacttgttaggaatccaagagtatctacatttgcaacaatacacatgtattttactttttatctaccgatgttcattttctttttggtagatggtagtacggttactacttttgttgtttcattactgctttttgctgttgcatatacatggattgtctggcttcgagtgggtagatacacagaaaattggtcagtagtacgtccgtttgttacctacattaaagcacaagaccatgtgtgtacgctagttattggttcagtacttttaagaacagtactattttttataaaacttaggataggttaagataggataggatggaggataagatatatgaatgaaataatgagttatgtttggttgggtgtgtttattgctatacccgtaattggctttatctatgtatataattacaatagaaaaaatccacgttggtaccttcgcaaaagctactgggcgccactagtgctagatttagttgtttttggtgtttgggcaatggtaggcgtaattacactagctgttggacatacagaaactactactaatacatttaatattgaaccacttacggtttataattcaccagaaaatatttatgcaaagataggtagcacggatgacagctatgttaactttgcaattacaggtaaaggaactcactctgcaccacttggtaacactagtatccattacgttgagtccgaaggtagaccgaaagtcacggttacttactacaaactagattcctctttctcagcctttatggggatgcagggagaacttgtaactaaaaaaactcgtgtagatattcaagtacctgtaggtggggtggatgtcacaaatacaagtagtacctttgaagagcaatcagtaaatgatttacttagataattccctaagtagcgggttacaaaaatccgctaagtagcaggctagagacatcttttataggtgtctcttttttattgacaaacctgtacagctatgctactatatacatgtaaataaaataagctaaaaaatttgagcttacctattgacattaaacaatgtacaggctataataagcttgtaagataaaacgaaggaggaatttacaatggaaaaacaaaaacaagtgattacaagaaaacagtacgaggagattatggcacgttacgataaagtagactatgctatcattgcagggttcattatctttggtacaattatcttcggttttggtggatttgtttttatggctgttgtcggtgcgttcacgttcccacgtatgaagcaaaaaagcattaatttaatagaacaagattacattgttgaagatgacatccaacagtaagcttaattgttgactatagaaattacaggtgttactataatggtacaaggaggataaataaatggcagaggcaaaaagaaattactctgacatgacagaggaggaagcccaatatgcaatggtattaggtgcaagaatcgctcatgcaagagaaacattaggtattagtcaaggggaactaggtaagttagcagggtttaatcagacaactatttctttaattgaaacaggtaaacgtctacctaacttgaaaacacttatccggttgagcaagattcttaaaaagagtttgaaaattacgttggaatgaggttgagaaaataaaaaggagagattattatgacaacaaaagtaaacgaaacaaaagcaaaagtaagaaacggtgaacgaacaccaaaagagttcgtagcaagtatgaaacggagtaagaaagacttatcacaaacgcaagtggtaacttctttaatggaaaaatacccagaacttacaccgaaagacattcaagaaattacaggtattaaacgtgggacagtttacacgattcaaagtcgtttgcgtagtgctcatcgtaagaaccatacgaagacggttgatacacctcatatggacaaggtagaatccattaatgaaacgatgagtccagaagctatcggtaaacaagatttattcaatcgtttagctgatgtatacttaaagaagattgaagaaaccgaggacattgaagaggctagtaaatacaatacgttgcttattcaagtgatggaaagtttagataaatgatagtaggattccgtctatatgatttaagagtcctgattctaccgtatatttaacaggaatgtacggtagaattttatttacataaacctattgacaataaacaataactattgtacaatgtatttgtaagataaatacagggagatgtttaaatgcaaacaataactaaaaattttgaagttatacgtaagacagatgatttaatttattatcatttttcaaaggagagtagctacgctgtcagtaaggaagataaaaaagactgggaagaaacaatgactgagtatgtgaatgactttcttgaacaggcttatggaaacatcccgcctatttcagtgtatatcaattctaggctttctagaacattaggttggtttcaatactatttgaaagacaatggtaagcccccttatatcgaagtaagtagtaggttagtaaaaagtgcaattctattaacagatactgagcacaaggagtgtgcatacagggcacttaatgacgtgctaagacatgaagcgattcactatgcgttgtatgtattagataaaccttctagcgatggagatgatacttttgagaaagatttatttgtaacagggacatctcctagtttatgtacacctgaacataaggtttacaaaaatgaattttctagagtgctttgtaagtactatgcaaagtgtcctgtatgtgatactgttcttgcctatgaaacaaagggtcgttattactgtataaacagatgtgtagaagcaggtaaggaacatccagttatatttagaccaaagaatgaacttattgtaggagtacaacatcaggtttcttatggaaacaaactatttgatgggacatatgatggggcaattaagaagtcctatatagaaaaaataaaaagtttagacgtatctattgacaataaacaatagaagagttatactatgtatgaagataaggaaagggagagatgaaaatgttagactttaacaaacacgtaacagcagaggatattatcagagatggagaatacaacgatgcagttgtagagcatattattgcagaactagaaacaagtgacaagaaacagcttgcgctattcaaacaatggattgcagataaaaaagaagatggggacatggaagctgttgaatactttaaaggtatgacagacaaagagattttgatttacatggacttagatgaaattgtagagtactatgaggaaactggtcttgcagattttgcagatagcttagaaattgactggacaggtttattagaaagctttggagtagcataaaagcaataaaacaaaaaaggagaagataactatgggaaaaagagaagaaagactacgtgaaatatatgaggaagaagacaggaatatgcgtatgggtagcatgtctaatgaagaactacaaagagaaatattaagagaacagttacgtcagcttaaagaacagaaccttgttgaaagcaagccaaatttaactgtgttcctactgcttgcgttcttcttgggtggaattggtgctcacaaattttatacaggtaaaatatttatggggttattgtatttagtattctgttggacgtttattccagttgttctatcacttttagatattgttattgcgttgattaatcgaaaaaactttagttaggataggatacaggataggatacaggataggcttaggataggataaacttaggataggatgaaaggggataggataggatgttaagcacagcagaatatgattcacttagagagtatttagtagccgtaattcacaacgatattagtgaaaacggaagcgatacacaaagcttagacgtatggaaagaggaagttggtagatatgcagacaattggagaggttggggactccgttgtttagatttagcagacttactatatgtagacagtcccgactcactggcagacatttataaagattacaaagaggagttaaatgagatactcagagactatacagaagaactgcgagcaggagccacgttcaataagatggctgacgaacacctcgggtgggcatgggatgacgatgacccgttaatactagaagcacacaatcaaggtttagtggctcgtctagggcttctaatcgttgctgaacaacttgctactcaattagaacaagggacgtttacaataccatatgataactaagtaacaggctagcctaagtagcaggctagcttttttcttctaagtagcaggttagctaaaatcttctaagtaacgggctacagtaaaaaaactctaagtagcaggctacaaaaatcctctaagtagcgggctacaaacagcttataaaatcccgaagcataccatccgaccgccagacctgccacctttgcccgttcgatatgccaccactcaaacccgttttttccttatatatagaagaaaaaagtttttcatcttttttagtgttctctattgacattaagaaataggcatgatatagtatagacagttaaagaaaggagaaacaaaaaaataaataaaaaaatttaaaaaaagttattgacaataaacaataaacaagctataataaacatgtaagataaataagacaaaagaaagagggaactaaaaatggaaaaacaaattatcgtgaactttttgaaagagattgaaaaaaatattaaaatggtaaacagaggtttaaaatctgaaaacgaaactcacagcgaacttgttggcatgtatgatggcattaagttagcaatgaaagcaatcaatcccgacaccgtaaacattgacttacactatacacgtacaatcatagaaaactattttgtaggtactaatgaacaaaaagaaaatgccttagaagctttacagcttgcgttatcagtcgcaaaagactaacatataaaacggcgggacacgttcccgccttacataaaaaaaaattaaaaatttttatgtttatctattgacattaaacaatatagatgataatataaagacatagaaaggaagggaaaacatgaaaagcaaagtaaaagcctttttcatcgcaaggagggaaaagaaagaagtaaaagagattttacagacaagaaacaaggcaataaacgagcttaaaaatttaaataaaaaacttatacaaaactattgacaaaaagaaataaacattatataataaatatgtaaggtaaaacaaggaggaaaaaagaaacatgcaaaagaaattatataagaaaagagatttttataaaaagttagcttcattcgctgttatgtttttacttggttcggttgttacggcagtattttcattttcagtatcacttattatcggtttgactttattcgtttttgcttttatgatttttgatgacttagactatacagtaagaaataaataaaattttttaatcaaaactattgacattaaacaataaacaagctataataaacacgtaagataaataagacaaaagaaagagggaactaaaaatggaaaacacaaaaaaatatacattagagggcttgaaacaactagcaaaagaaagcgggtttgaaattgaggaggtaaaaccaaaattacacgatactaatcgttattattggagcggtagcatttacggcggttcagacttcattttcattgaccacgatttaaaaattattgtaacaggtaacacacgagcaacaaaaagcgacatgtatacaagaaacaacacggaatgcaaacgaaaaagagacttaaacgaggaaaaagcttattatgaggggctagggtatcaagtatttaataatggggctttctcttatgaggctttgcgattattacagaatggaagtgttaaccgctcattaaataaagaatacagcttacaagaattgcttgacatgaaagactaacatataaaacggcgggacacgttcccgccttacataaaaaaattaaaatttttatgtttatctattgacaaaaagaaataaacattatataataaacatgtaagataaataagacaaaagaaagagggaactaaaaatgaaaattctaatagacacagttttatacaatccatcaattgaggtggtagaagttaacaaagttgaaaaatttgtaaaagtggtagacctatttaacgataacgaaattaaaaaattagaacttatccaaagtaaacaagatagctataaatattactttagaatgggacttagaactttttggcttcataacttatttgacaatgccgaacggggggacaagcgcaaaagtgtttgggaagaaatgcaggattttaacaaaacaatggcattaacaggcgttacacgttataaagacatgaacgactataaacaagactatgaaacactagaagaagcacaagccgattttgacgaaaaactggcagatggttttattcaaaatattacattggcaacgtataacggggctacacaagaaagcacattttacgagctaacagacgaaaatattctagaagctatttatacagacttgcacgaaactgattcttatgatatgttacaagaaatagaagaaagcaccgacttgacaaaatgggactatatacgagcttatacagaagtttataacgtgtttacacttaacgggcttgtatacattgaaagagattaaggggggacggtgtgacgatatgaaaccgaacaagaaactagaagcattgaaacgggctagaatggaaaaaatagcccgtgagacaatcgagaagcctatagaatttatttataacggtaactatacacaagaagaaatgtattatttcatggaagaacgaaaacgattgaaaggaattaaaaaacgagaataaaacagttgacaaagaaaaatatacatggtatattatacatgtaaacaagagaaacacctattcggacgaactcaaaaaaaagagtataaaaaatttagtcaaaactattgacattaaacaataaaaactatataatagacttgtaagataaataagagaaagagggaactaaaaatgacaactttaaaagaagcatacaacgaaattattgaaagcaacttaaacgaaccagaagaacgcaaaacatacttacaggacttaacacaacacggggcaattagcggaatggttggtggtttgatttactacaatgaaacaactcaattctttaatgaacaccgtgacgaaattcttgcaatgttacacgaattaaaagaagaaacagggctagacgaaaaagggctattcggtgacaagtggaacgattgggaagacttactagaagaagaagcggacgacttagacccgttagcagacacaaacaatcaaaatttactagcatggtttgcggtggaagaactagcaaagaaagaacttgacgaactagaagaagcatagcaaacacggcgggacatgttcccgccttacataaaaaaaaattaaaaatttttatgtttatctattgacattaaacaatatagatgataatataagagtatagaaaggaagcatacaaaaatgttagataaagaatatttacatcagcaactagaaagaagtttctatcctataaacgacattaaacgtttatcggtgctacacaagcaagaacttaacaacttaaaaaaccatgtaagaaagggggctacaccggaacacgtagccaaacaattggaagaactaacaaaagaaatgaacgagctttcaaatcttgcgtgttcattagagttatatgttagaagtgtaaagaaccaactaggcaacgaactaggcaagaacgtaaacaaacacgaataaaaaaaatttaaaaaaagttattgacaaaagacaataactattgtatacttaacttgtaagataaataagagaaagagggaactaaaaatgagtaaaacagttgaaacagttattacattgatgaaaagagcagaaaagaagggcgtagcaatcaaacgagcaagacaacgggacatgtggggcgtaggagaattacaagaagtttatcgagtagaaaacaacggtaaaacagtaagcttataccactacgaaacactaaccgcaaaagttgaccttgaaaacatgcaactaatagaggtatacggggaaagccgttctgatggtgatagcgtggcaactttcttatctgaattaggtttcaaaaactttgactttggttttaaaccagtaaacgggggcttttggttattcactaacaaagacggggaaagacaagaaacctatctagacgaacaaggagaaaccgccgttataaatgaattt

SEQ ID NO: 6 - DNA, 148244 bp, Unknown
  Description of Unknown: VREML110-2 complete genome sequence
tgtcattaactcctcgaacaatcttatctaatgctgttttttcttcttccgactggtgatacttaattttatttacttcctcatcagtcagtttttctccacggtcaagcttttcaaataaagctctaatctccgcattttggaatgtttcattgttatccatttttatccccctagtttttatgttctcaatttataatatagtacttagttgtgagaagtacactatttatatgctacaactctattataacacaaaaaaaccctgaggagtcctcagggatataaagtcttagataacgcttgtacctgcgttcttaccgttgttaacagatgctgaagttaagtaagtgaattgtgttgattcagttacgatttcattagctgtaaatgattcactgtaagatacggctgaacatccacgatatgctacaacaaccgcttttgctaagttgtccatcataacgatgtcgattacatcacgtaataggatgtcttcacctagggcagtaattcctagtgttgccaagtcttcttttttcattctcatacgttctaagttaatgtttccttcatacttcaagtaaacatgctcttgaggcatgatagaaccgatttcgtacacaccttgtgttccgtatgaacgctcaccactagctgactgtgctcgaccgatgattctgtttccaatcattaggtacacggtattaccagtgtggacggattgattaataacgctagccatttatgctttcactcctaattattatttttaaaactaaggggctatatagcccctatagatattatgctgttaagatttgttgttggtaagtcattgtaacttcaatcttattgatacctctcactggtacaactgtgaatgagataaacactacatctccgtcaataactacttgaacttcttcaggcgcataatttgtgatttcacgtacacgtttcttatcatctaagaatgattggataaagttcttgattagagaaggtgtcaattcaacagatttagttccgatgaagttgttatccaatttgatttttagatttgatactaagaagtcgtgaccttctcctacgctaatttcgtttttaacaggagcagttttatcgttataagtagtaataccttgtacgatacggaaacctgtaacatcactgttacgaacgaactctaagctgataactccactttcgtttagttggtcaagctgagcgccttctaaaattacgtctaattggtcaatagcaaatggtttgaaggtaattggttctgcaacctcaacccctgaagccaatcctgccatttgagaagcaagcatgtaacctgataggttcttaactcgtccgtcatccattctacggctacctgaagcacctactaaagctacacgttcactacgtaggttagttgctctagaaattaattcctcgatagattctttaaatcctccaccaacgaatactctcataggctctccgttaactgttctatcttgtacaaaggcattagcttctgcatgtaccgcaggcttagctgttaatggtactaagtagtaaccaccttcgttagcaaattttttgaatttgtttgcccaagattcaggaacagtaccgttgcttcctcctgctaacttagttagtgggaagtttgaaacttctttttgagggtcaaactcaaatgatacataaccgttgtatgcagtttgtttttgaatatctcctgctagtgctgtgatgaaaacatcttttttgttcttgatgtctacagcatctagtttttcgaatgtttctgttggtaagtttttgtctccgatagggaagaacttagctgtgaaatcaggtaagttgttgatgtcactaataagaatattagtatcctcatagactcctgtacctaaatcgtaagttttttcaaacgttacagttccacctgctttaggtgctactgtgttgtcttttcctacttcagcatccccaattgctttaccttcaacacttgctaaatcagaacctgcacgtaatacaagttgtgaagctttacctgttgttgaatctaattcgatactcattgttgcttctgcttcttcaccttgatactctacagagaatactttccctaagttatcaaatgtttggctgtatctatctttagagaatgcaattgtcaaacgtttagtacctgttaaggtattatcttccaatgctacttgaatctcattagaatctaaaccataaatttctgagttgatagtcattgcatctactgttagcttagcattttcagcatcttcaacacgcatagctaaaatatcacctgcattgttaagacctgagtttgttgatgggttccatgctagctcaattgcatctaacaattctcctccacggaaaacttgtttagcttgcatatagttacgtactcggtaaactgtatttggtttcccaccttcagcagaccctacaagcattaacacttttacggaaccgcttgaagctccaccgataccacttgtatctgttttaatctctgtatgaggtctagatacttttttgattgggtataattctactgccattttttagtctcctattcctaaatatttttttaaatatggtacaaaagcttcgtcacctttttggtagtgattacctgccatataagctctaaaaccttgtacttgaacctcactcattgtaaacagtattcttgctgtatcaaggaatgtgtctatatgaacatactgaagagttttttcctcagttggttgctcctttttactttttgccatctttcattgtcctcctaaaaataatctcttttatactactggctacgttgtattccacaaaatatgatgacgtataagttaacgttacggttcttcccataactattgtatccccatcctttataacaggagccattgcagaaaatctagttttctgtaaactataatagttttgttcttggtcagactgacgtaacataatcaatatcacttttagaatcgcatctaagcatctaacagtgtctgcattattacttatagaagtaatacttatactttcacttgcggtgaatcccctatatgttccatgagggtcttctccatccgtagcaggatatttggctgaatacttgatgttaatagctctgtcaagtaaaatttcattacccataagagcaaagtataacctgttaccctcaatcgtaagattatcggactctgcaaaggcaacatcactactactaatatactcccctatctcttcggaagcttctacgtaaagcgtgtttctatccactttaacgtctaagtcctcacttcggtaacctttttctttgttcacaaaggttccctcaacaccacctaacgagtttttactctctaaaccgtcacctagttgtatcacataagaggcaaggtaaggtgtctttacatcaggaaagctatatcgtaccgtaacttcatgcttagccttactgtctccacagtatgcctttttaaaagtttcaacaacttcagtatcaaagtctcttaaaacttcatctataatatagcactcgtgtaagataatgtctaacatgtttgtaacttcttttttaagatgcgtgtcaatacttggtaccatttcaatcccccttacaagttattaagtttccatttcataagtcgttccatatttgctaacaatgttttacttaaatcattttcgttagcttttcctcggttaactatccaactattcgcaggagaatcttggttaactgttctaaaagcaatatactctcttctagtacctgaaccccattttttatctattgcagttacattatttgacctaggtttatagttcaatgatggtaccgcagaactctcttgtcttctatcatacaaatagttcgtgtacagcttagtcttagctcctgcaacctgtggtgtaggttgagctctaagttcatcataagctcttcgagacatgtctcttgtttttatactaattggtacgtacatataccatttaccttctttgttaatctttctattaggagatttagcaaagtagggttttaagtctataataccttggttagccatccgttgttctgttacttctaaatacttaggcatccgcttaacttgcataccttgctcagaagcataattagccccttcttgcaaggtatcctctataacagcctcagttaagtttctcaagacctgttctgtgtttgtaaacaaattaggtcgtatactcataattacctcctatatcttaccgaagaatcctgagttgtttgtcggttttctcttagcccccattaagttttctgactcttcatccttaacaacctctttcgtgttgctttctaaggagaatggttcagggttaataaagatgtcttctcttttaagtaagagctttcttggcaactcttcaaagatagcgttatcacgacctctattcttagccgtgtattggtatctactctcttttaataagtctattactatatatcttaacacagtttcaatgtttaaagacacattggtgtttagtaagtgttcctttggatagaaaatatttttttgatagtccatcacaaagtcttcaccctcagtcaaggtaaccccattttccccctgtaactgacctcttgccattgttatttgcttgacatcatagtataaatatacacctttttctagtcttctttcatttatatcgaaaatcatagactggtatatcttaacatcaggcacggttaatctatccctaaaggatataggctcattaaggaagctagttccaattgctgtccctgaatcgtacaaccctaagtccattgaaacaatacctttttcttgactttgaatagctactgcggtttttaccgcagggtcataagctacacccttacctaaacaaatagggcatgatgggtcaggttgtaacgtttctttatgcctacaggtacaataccatgaacgctcccataagacatcaatacctctatcagaaacgaacttacgcatactgactgtatcaaattcaagccttgccccactagtttgtttagcaggggcttggctctcaggttgcttttcgaatcttgttggtttttccactagaatacctccattatactacgttgaatgacattccgaagtacgattttaggttggcttctaagtcagcaatatcttctttgattaaaagaatatcggcggctgaacctgaatacatcgctgattgggttgtttgaacagtttcagatataccgtcaatacttaaagtacgtcctgcaatacctgcaccgatgattaaacgaccccattgttggaatacttcaactagtgcgtatttaagtactaattgctctaagtcagcaggcacttcccattcattgctgactcctgcacgctctctaggtaacaaacctgctacatagtctacgtgtatcatttggggtgcgaatgtttgctgactacctactacaggtaaccctgcatacattggcataccataaacacccgtatcataacccatacctcccatagctgattgcattaaggctgtaggcataacttcaatgtgtcctgccaacccgtatactctccaccattcacggttgtagttatatatttgtctaccactcatctctaaagtaaaattatctacgtagagaataggtcttttatacgtatgagtatacatataagagttgaagtctgctgaatagtagtcatgatgctcgttctgaatgaatctagggagtatcgcaatgtctagttccttttcagctttagctacagctacttcaagataatgttgataataggtgtcactcatctcttgacccgtttcagggtctcttacaggaacaccaaacatgtagctcttaagagcctcaggagtccaaccatagtccgctaatgtgtatttagctacatcctcgggcttaactcttaaagggttaccgtgtgttcctatcggttgttgattcatcatgctatcacctttataaattattttttagttgtttcttttttagcaggagttttcttagcaggtgctttcttagcaggtgcctttttaacgtcctcaggagcctctacaggggtttcttctttttcaggtgtatttaccttcttgtcctctttaggcttctcaggggcttgtttcttgtcctctacgtaactatatgagcttaccttactagcaagttccttttgatgagcttctgataggtcattactctctccttgcatattaaatacggcaactccataaggtgttgctacggtttttcctgataatagatagttgattaacattatatttgtcctccataaaagtttagtttattttttaaaaaaaatagggaatagcctctgaccattccctattaaattctttattcaattttccccttaagtgtttatgcttaaggtttaatttcgttgaatacgttgtctgtagcgatgtacgcaacgtttttgatacgaacccattttttaggagcacgtagggctaatgcaccataccataatactgcgaaggtatcagtagcgttagtacgagccaatggtaatcttagcattggaagtaattcgaacaagttaactactgttgaactcatttctcccatgaagatgtccgctgtttctgcgatgttttcgttcacatctacatactcaatcttgaagttaactgctttagaagcaggaatacgttcgattaagtagaattgttcagtgtccaaacctttacggtagatagatactgattgtggacgttgtgcgtacatagatgttaaatcaatgtccaatttaactccgtctgtagcgttagcaacagttgcagtaacaatatcagaaggtgctgatttagctccgttagcattaactactacacggtattctaatgaacctttgtcgatttcttgtttacggaattttccacctttagctgtttctactgtagcagtaactttagcaggatgtggagcgttttgacgtaatggttcgtaagggttcaagatgttgtctaactccattactgtagaaccgtgtaaacggatatatccacgagctgagttgaatccttgaacgttgtaaccagtagttacgttttgtccgttgttttgcattacttgaacttgtcgtcctagtaaagtgtttacgaagtctgcgtgtacaccgattggcatataagcatctgtagggcgaccaaaacctttagcaacaataactgaagctttgtttagggcttcctctgttaatttttctcctcgtaagtctaatacattatctttgtcgataagtttagccaaaccgttgaactctaaacctgtatcaggttgagtatcgtctgataaatctccatctccatagaatgatgcccactcaatagttttcgcaattgtagccactgcatcctcagtaaggatttccaatgggtcttcaatgttgttaaccaatgttgtagcaattgagatgtttttagtatctgatagatacttcatgtttactgttctttgacggattgatgggtcattaacttcagatacaccaatttcgtttgtgaacaatgcagaacctacacgtccgtgtgctaagtacacatcgtatttaacaactgttgattgaacaggagtacgtgttacgtctctatagaaagataaatcctcctgagtccaagtttgcataactaagtctgattgtaagaactcacgtcttaaagctcctgcatctagctgtgtatcaggagtaataccgtaaccagttgtaaaacctttaacagcttcctcttgagcgttagacagcttagcagatttttcaactttgcttacatctactgtatttttttcattttccatttaagcttattcacctttcattcgtttatatctcctaataaagagctaacctagcggaggcactagggggattgttagctctcatttaattctctgtttataatatagcactcacttctaaaaagtgtcagtaactagtagaaaaactaattattttccgtttaagaagttgttcaagcgttcagtgtccgttgatgttgcacggtcattgatataacgttgccaagatttagtgatttcacgtagtgcattttcatctcgtgcactagctacgctcttgcttgcttcttcaaatttagatttgaacattgtttcaacttctcccattgttggtgcagttacaggagcgctgtctacattatgagctgatttttctaagtcttcgaagtcatcgtcaatggtgctagatttctccatataacctacagcttttccctcaggttctgcttctacagcatcgacatatttcatagtagtttcctgaataggtgtaactttcatatcatccaaagatttactaattgtttcttgtgaacctttgattgcagtaagctcagttgttaatgttgctacttgtgctgatagttgtgagtatgatttaagtactacatttaaaagaccttctacatcgaagtctgcggatttctctgctttttcctctttgtcttctttgtcttcttcatcagatttttcagcttcgtcttctttagcatcctctttatctgattttgctacagatttctctgctttctctgctttctcgtcatcctctttgtctgatttttcagcttcgtcttcagatttttctgcttcatcctctgatttttcagcttcttctttatcagacttttctgcttcgtcctcagtatctttttcagatttctctgtatctgtatcttctacagctttttcagtatcttcagcatcttctgatttagctacttcagcttccttagcagactttaatagttcttcgtttttttcgatttcttcgtcaaaacttttgataatgtcttttgccactatgtttaacccctttccttatttaaaaaatctgttgcttgttgcttagatatacctctacttagttgtaaaagtattgttgctacctgcttatctacctgctcattttcagctaggtatttactaacatcgtcccaagtcttatcaatcaactcagaatcagtaatagcataaacatgactaagtgtcgtgatagctcctacaatctcttcttttctaagtgctcctgcatttgtttgtgtctcaggtgaagttccatgtcctgttgtccatgacttaactagagtttcccaagttgcatgaggatttgcaggatgtgttgttaaggctacgttacgaacaacaagactagtgattactcggtcatcttgtgtatctctgctaacaatagcaccctcgatagaaaaacctaagcacctgtcatctcctgatttcttaatactgtgtgctagtttccacatagctttagcataagaattatctgcatatagttttgcctctacgaataaacctttttcaaagtctacataacagttctctgtgggagcacctatgataaattccgcatcttgtttatgttcgtaatttatccatccatactctttaaaataagaaatgtcaattccgttagggctaactatatcattttgcaaatctaaatcaggtgttgaggcaaatccttgcacataccaacccttaccgtcttctgcggtctcagactttttgaatgagttttcaaggtcgataggaacaaacacattaacctttcgttccattaaagcttccatcttatatcttaccacctgcctatgatgttgtttaggtggtacattattattataccacatctgactataatatagcacaaagttgttaaagcatttactttgtgctataatttagatttatgcttttcctgaattggcatttggtgcgttcttactttgaccgtctttaccgacctctttattataagaaccctttccattaacactatcagtatttcctgctaacccgccttgaccttcttgaacatcttggaatgaaactgcatcttcatcaacgtctgagctgaactcagggttcgacacattatccaatattcttgaaagtttagcttgttgctcttgtttttcaacattacgttgttgaattgcttgacctttagattgtacgaatacaccatccaagataatatctccaccttcgatagggtctttaccttctaatgcacgagattcgttaatagtcatgttaatcttaactttctcttttaagatttctagtttttctaactcagtctctgtatctccaccaacaaatacgaacatgtattcgtcaccaaactcatcaacaataaatctattgattgtatcagcaataaattctaacaaaggcattaaacctttattttgagatgcttggtttttctgtttagagttaccttcgttaagagaaccacccttactacttgatacccctccgttattagggaagtttatttcagcagggtcaataacaaataccgcacaaattacattgataaggtatgttaaccacttttcaaactccatatctctagcagaaggtgtcatatttacaaatttcacatcttcagcagaaataactggtatctgccatgagccattaatacctgataatgaactcttccactcacgtctaaaaatatctaacgcttgttgagattgattctgtcctaccttaaggtgtaatacccctcttgtagttcctccatgtgaaaagaatctatcattaaatatctcagtgttctcttgtgcaataaactgtttaagtgcaatttctgtttctgagaacccataccctgcaacttcaatatctgaacgagggttacgaaccgcaaatgccatttcttttgcttgaaacttagctacaactcttcggtctataacctgtacgtatcgttctccatttttaatcaatttacctctgccatctgtagcaaagaaaatagttgatgggtctaccattgtaaatcgtttaaatttacctctacggtcaaaaaccttctcaaagtttacttggtcatatacataagtgtcacgaacgaattttttgacaaatgttaagaatgaatctctagtaacatctttcgtatctcctgtattatttaagaagtcctcaatctcacgcattgtttcttgttgttctttagttggttctaaatcagaatctttcaacctaatctcgtaacctaaacctttatctgaatatcgtacaggtttacaatataaagatacttggttagaacgtatattaataattgagttcaagataatattcttgctaaacctctttaatactgtatgcagttcttgagagtttctaatagaaggtttaatcttgaagtatgggttcatactcattgagtcaatcaaaggttcagagtatgccacctctttccctgacaaacctttctgaaccatttcacggctagctttagcttttctaatagctacttggtagttatctcctgcatctattacggtggtaggttcactgctatattcttcaatacctaccattcttgctttttcaaaccaatttgccaaacgttcacaccacctttacttttatgatattatttccttggtacgttaagctttgtggaatagttaattctaaagtctcatagtcgtctgcttttttatagaaaaacaactttttactttctaggacatccgtgtaatctgcaatatgtaaattagacctactgtctatcagcaatacggactcatcatctagaatgtgcaaaatttctctttgtttatctgctatgatagagtgaaccatcgctctatgtcctccgagactgtgatagtattctactatttcaacccaattgttagccattccattagctttagctacttgtttagcttcaacccacagctcatctgttacatatgccatgtatcctactcctttatctcttttctttgcccaatgtatccaaagacacaactagataagtagataatcagtattttaactgttatgcctatctcagaaggtctactgtatatacctgcgagctcttggaatatagggcttgccatgtctctaaatatgataaacatgcaaactatacctaatactattataccacattttaccccaaaaaatttatcaggtttcttttcaataccaagtataaagatgtaagacacaagaaaatatgtcagcatcccacataacgccaacatcattgtcactggtaacatattaacaccctcctaaatacccatatatacataatatagcacaaaaaagtagacctcttttgaaggtctactcttaatgatttttattctattaccatccgccagtagtaggtacgttagaccaaccaccataacgttcgttagcatagatgtctgccatacggtcttggttagcaggtgagaaatcatttgcatctaaaccatgacgtgaagcaatgctgttccatgtacttggggcaaactgatatgctcctaagtacccattacctgtaaaggtattatagttgtttgttgattcaaccatacgtctgttagctttatgccagttatcatctgaagctactacagtagactctgctacttgtgcttgttctacaggttgtaattgttctacaactgcttcttgaactggttctgtcactacaggttgctcagcaactgcaacagtaactgccgttccgtatgtttctagtttattaacatcgaagtctttaccacccactagtagtttttgacctccgaagattaagtctgcatgttcaatagtatctgtgttgttaccatgaattgcttcaaaatgcactccgtatttatctgcgattttagatagagtgtcccctgactcgactacataataagtgttgtcgttttccttaacttcctctgcttttgctgttgtcgttcctagtgctaaaactccaattgtacttgctagtactaatgctccaatagctttcttcatcataagttattttttccaccttttcttatttttggtttgtcttgtcgtgatgacatatcttaatatagcagttagatgttacacacgtagggtatttgtgtaacagtaacattaagtaatgtttcagaaatattacagcaaacaaaaaagagggctataaaccctctttaatcgtttaactaaagctaccccagtagtctacacgtttaccgtttttagcattacctgtagccatatatccgtagccattacctcttggttgacgaatccaaacatatttgctgtcaatcatgtaagcattatacttaatagcttgacctgctccaatatttgcaatcaaagctccattacctgaagcatcaactgtcaatggtaacgtcatttttggaacgaaagttccattctctgcaatccacttacctgtgttacttggtgcaggtgcgggtgcaggtttattccctgcgttgtaacctccaacaatatcttgagaaagtacccaacctaatggaactcctttgttagtgattagatattcacggttagagttagagtatttaatagctcgttcttctttaactgcgaaggtgctaccttttacccaatcagaaattttagcgcctttactacttgggctgtaatgagtagcatgtttagctatagttacagttttttgagcaggtgtagggtttggtgttggattcccaccagtaccgacaccatttgctaagtctttagcaaattgtgcttgtgacacaccccatttagttaagtaagggattgggtcaatatggtctgaaccgttgtttggttggttatgtgtgcagtaattatgtgttttaattcccgctaaagcacttgaatccaatgttaatgggattccaccttgtttagctaggtctcttaacaattccacataaattttatagtcacgttcaaactctgcttttgatttatgtgactcaattaattcaacacttgcataaccttcagcgttccatccgccaccaacatcataggctccacgatttacattagcagtttgaataacgataccgttacctaccacatgtgtgtagaaaccatcattgatgtttttacgacccatgtaatctgcttcattctgagctgttgagtttgggttacccgtgctgtgtgcgtgaacttgtctataaggtgttacccctacttgaggaagtcctgcacggatttgttttttaacagtataactcactttgttgtcctccttattattttctttgccttttgcaatagtgtcccattcgtataatctatgttcttcgataatcttaattatcttagtagcgtaattagggtcagttgcataaccgtaagtagccacaggtggtaatatagcatgaactgcctttttgtaatcagtctctccaatgagatgtttatagttatttttcctaaaatcactctctgtaaagaaatttccgtggtcagttacactatctgtccaactattgtattttcggaagttggcatctattgtcacccaagaaccatttaaaaattcttttgtgggcactctataaatttcacctttccaatcaccgctagctttaactccaaacaagttattagcttctgtagctagagagctctctccccaaccactttctaaaactgcttgcgcaccaactaaggaaggtaatatcttaaaagttacccatgtgttctctgctcctgaacgtattttattcaagaagtcttgctgttttgtcattctagttaacgccccctaacatgcttagtacatagaaacgacaaaaaactcctatgctaccttaatatagcacaagagctttttattttagatttccatgattttttttacaacatctatgttcatagcttccttgtactcaaagtccaataacaaggttgtttcttttttgttagttttcgtgctaataaactgttgccctttggataaagtcacaacaacccccgcttcaggtgttcttttaagcttccctgctttcttaagaaaattataagcttctgttccttcagtagtagctaagctattaggtaatgccatctgaatgtggcggtctatttttctttcataagggttaatagcaatcccaataagtccttgaactaaagaagcctcgtaagtaggtttacttatagactctttagttacaagatttttcatattagtatctgtcattaagcttcactctctgacttttcttttagctcaagatgtttttcatagtaatctctaggcataaagacgatattagccattaaatcatcagcttgggtaacaggtgagatacctgtacctacaataatttctacatcccctaaaggaagtacatcccctgctttgactgctttgtaaaacaggtcattaatcttgctgtctgttaaccccttactaacagctaaacggaataagtattcatactctacaggtacttgttctctagtaatagtaaatgataagaaatagcctgaattatagtctccatgtgtaggtgaaatacgtaaaaatctaaatttctcatatcgttcacgcaatagatgagtaactacatccaagtagtctttatagtcatcttcattatcattctgaagaactaaatcctccaagtttaacttgttatcctcaatcttgtatacagtgtttccaatcttaaattcgttcaaattagtatctttagtttccattttatgtcctcctgttattaaatcactcatactgtgtattatatctagcaactccctgctaggtaatgttttcttttctgtgtttataaggaatatcagaaatattgcataaagtacaactgatatgcaaataactatcactgttatatccacaggtagcaaaaacattagaagtcccctactgcctgttttaactcctcaaaagttgcaacaaggtatttacctttaagttgcatgttgtattctagtgccaataggtatagagctttaccgcctacatcagggaatttaagccctaattcatagtctaaagctaatttaagtgtttcatacaaagaagttaaccagtaaccccctacagtaccatctgaaatagtaaaatctacttgaataaatttaccaaccttgctgatacctgttaaaaaccttagtacaccattttcatctcgaccttctaagtaatcagtcgattcacttgaaaagctctgattatcttcccaatcagataactcactagatatatccttaactttctttggtgttgtttttgagtttaaatcaccaaaagagtaatctctagaaaggtcagaagcttttacaggttgttttccttctgaaggagtttccttgtctaggtcattcccttctgaatcttctttctctttatccttgtctacataaattttcatctttgtaggtttaccatttctgactacggtttgttctactgctgttaacctagaaaaatctttatttccacctttaatagcttgttctactgatatagaacctaaacataggtcataaaaatcttgataacctagttctttaactaaataatcatattctgaagttaatgatttattagctttcctaacagaatctaaatcatgtatatccatttttgctaaactagaaataaaatctactgacatattaatattactagcaattatattttctgaagtctcgttgttcattagtaaatacctcctcaataatattatagcacaaaaactctttaagtgactttgttgactttgtttcctatttaaactttttgaagctcttattatctttttatatatatacccttttaataaacatatataaacttatataaacttacgaggggagcttgttgactttgtttcctatttaaactttttgaagctcttattatctttcttttatatactaattaaacccttatataaacttatataaacttacgaggggaaaattgaaaataaaaaaagaagccgactcgggctccttagatttggttatagtattctttgattttattctttctgattgtggcttcttcagcagtctctttatcaggaaccttgtataggttctctatctcagttggtacgggtaacccaacaggactataacgaatgatatggtcgatgttcacatagtcagattcagaatttctatctttacctagcttgacattgacaaagccattacctgttcctgctttagcacttgccaacctagattcaggagttgtaactccacccctcttatcggcaaacacataagcctctgaaccatcagagatttttactttaagtgcattttcgtttatgctcatttttactagctaaccccttccttttgtggtatacttatagtataacatattacttttgttttagcagactgaagatatacgtgacagatgctcctaggattgccataaagattttttccactaaatctttctttctgtctacttccttcacatcgtctcctttcatactctcaacagttttttctaactgtgtgatttgatagtacaagtgtgattgcttttcagcctgtattgcagtttctttatctagactttgaacgatagactttagttcatttatagcaatagacagttctctacgttcagcatctaggttgacaaagttcttatctgaagttaaagcgcctgattgcactttttcttctagtgttgatattctacgaactaagtctgttgttgataaattttccatgtactatcctcctaattcatattggagttagaaaaactcgtaactttagtttgagtgggaaaattatctatcaaattttgaacaatggcttgtctgtttttggtcacaattgttccgtagttttctcccgacttgatttcaaattctagtttcccatactcctttaagtcaatggtttttaagatgtagctctcattgtttctctttttaactttgtagttgtatgagaaacccacgagtgtggctgttgttgcacatcgacctatagcatagatgtggaatacagtcctgtcttgttgaaatttatcaatcatgtctaggaactcaaccttaagtaagtcttcgtattcgagctcaacactgtctgtttgaggtgtttggctctttttgaaaggcatattgaacatggtgttattcacccccttcagaaacgaaattagcaatagttataagaataattatcgctatactacatgtgataaatataaggtgtacgtatcgcataaataatagcattccgatactcgacacactcaagaagaacatgacagcaatataaaaaacatttaatacaattgctgaaacttctccttgctgaagtgacagaactagtttaggcacaatcttactcgttgtccaatagcacaccagttgtatgagaaacacacataatattgcaatcgcaactaaactcataagttggcacacctcctagtaaagctatttataatatagtataagtggcgggaaaattatactcagtaagatgtgtgctaaattaagtatatagagtatttttattaaggaggatatgtatgaagttttttaatcggcacttggtgctaaaatcactagtagtagttatctttagtttgtttgttttggttttagcttactttggtggtgtatggcttgaagtcactccccatgtagcattaacctacatgacaggaggaataattgcttcgtggtcagcatctacaatgtatgaccgaatcgtaatgaaaaaagtagatagacaagtctataagaacgtggcatcacaatcagaagatattacaaagttaaaaaatgatgtgagggagttgcaggaattaaatggcacacataaaagaccttacacgagaagagattaaagagaacagaagttctataattcgttcttcggctaatgttaacaagatatatgttggagataaacgtattacaggtgtccgtatatgcggtatctgtcacaggaacttaacaagttttgctcctgacagttgtacgacttctgttgtttgtaaccacttaagttgtcgattatctaatattgccacaataaacatatgtgcagatatacgttcttgctacgcaaatataggagcagaggaggaaaataatgagtaacactgctgataacataagaaaacagctcgaaaaaaagaaagctcctaaatctagtagtgaagagcttttagatacaataaacgaagcaagtactttgttagttaagaagtttctagcaaacgtccaatcaggctctgtagagcttactgacgtacctgacttagttcgggtcatcagtatggcaggagaccttaacagttggtctaacggcaacacagggggcacaggagcaccgcctgctgtaagtttaaaacagtctgagatactagaccgagcattaactcctaaaaaagaaattgtagatggagaagaaaaagaggttattgacctttctgaactcgaagcgctacccgatgaagatatagaaaaacttctacgggaaagagaaataggttataaccaagaaaacgaggcgactttttaaatgacaaatagagagctagggtctcatctagctaacatggctcgacaaacctttggtacagatacaccaaccaaagaccagttgagctatttgttagaccagatgcaaccatcaacgtatttattaaagaatcacacggtgcgtagtcacccgataacttttgctatatcaggaagaaatcaagaaaaagcccaagcacatagaccttggcaagtacagattataaatgacactcatagaactagagcaatcatcaagtcacgtcagctaggtctttctgaaatgggtgtaggtaacttaattcattttgcagatacgcatagttacgatgcagttaaatgtctgtatacgttcccaacacacagtcagatgaaaaagtttgtacagactcgtttagaccctgtgttagagcgtggatactatagtactattgttgaccctaaaattaactcccttgaagctaagaaaataagaaatagtttcttatatttccgtacaagttcaaaacctagtgcggtagagggtgtggatattgactacttgtctatggatgagtatgaccgtgtaaatgcctttgctgaagcttctgccctagagtctatgtcaagttcaaaatatcagattgtaactagatggagtactcctagtgctcctgatatgggaatccatagattgtttgaccgttcagaccagtactggtatttacacaaatgtgaaaaatgtggacattacaacgagatgaagtatgacgaatatcaagctgaggctcctattgaacgtagagggaatattttatgtgtaaaccctaaagggattgacgtagtggcaaaaactgtagttgatggttccttccaattcgtatgtcaaaaatgtgggcaaccgttagatagatggtacaatggtcattgggttcctaaatttcctgaccgtactaaaggtgggttaggtactcggggttatatgatttcacaaatgaatgctgtttgggtaacggctgacagccttaaaagaaaagaactagagtctatatcgaagcaggcgttctataactatactcttggttatccatatgcagatacaaaattaatggtatccgccgatgacatttatagcaataaacgctcttacttagagaaacctttatttaatcggggagattattcctttgtctccgtaggtatagattggggtaacattcattgggtaactattcatggggttaaacctaacggacaggtagatttaattcgtctgtttaacgttattaaacctgacgtggtagatgctcgtgctgtaggtgcggatgtagagaaaataatcttagaattgaccccatacagacctgacattatagttgctgatattggagactcaggggagaaattagctaaattgattgattactttggtcaagatgttgtatttgggtgtaaatacccttcaacacctaaaagtacaggtcaagttaagccaacatggaacatcaacggaaatattgtttctgccgataagctaactcaaaataaacgatatattactaagcttaaagaggggcaaattggtgtttactctcaaagagaccgtgaacttgatttctatgtagaacattggaaaaatgtggttattcgagaccaagaagatgataatagtgaaggtcaattttatcaaacgattactcgtaaaggtgatgaccactacgctcaagctagtgtgtatgctatgttgggttacgaacgtttgctagatgttcactacggtatagattcttatggtttagactccgcttggataaatgaaacagtagctacaccaacagatatatataatcaatatggaaattaaactttgttgtttcaaataaggaaaaagtgtggtataattaatttgtagaggaaataccagtccgtttcctctatagtttattagttcatgtgggctagggttcccccctagctcctccttatttgaaagattaataaacttagtattgacaatcatacaagtatgtgctatattataaatataaaataaaagaaaggtggttactaaccatgtataaactcaatgaagaacaacttaaaaatacaaatactgcggggcgtaacccctttattcaagataacccgtggggcacagtctgccctcacgctatctgttgacgtaagcttttttagctttcacaattagtcaacaggtagtactcaagggtgctacctatttttgtacccttttttaaagtcaacgataggaggtaagcatatgtctcgtagttataagcaccatcccgtatgtagtagtcactcatctcttaaagaatacaagaaggtatacaataggagattcagacgtagacttaatagaggagagcttgatgatgcaacttttggtaaaagcaaatcttatcgaaggatagaaaacttttcttgggttgctgacaactataagttctaccatgatggttaccagtctagtaaatggtgggggtactatgaccctaacgtagaagaagagtatcaagactttatgaagtggtacgtccgtaagtaattgcggggtagtacccaagaggttaaggggacggtctgcaaaaccgttatcgtgggttcgaaccccacctatccctttaaaaatattttaaaaaagtattgacatctacataaatacatgctattatagtttatgtagtaatgagttgcatgtaaagcaactctatgtttggtcgtatagggcaaaggcagtcccaccaccttgtcacggtgtgaacatgcgggttcgacccccgttgcgaccgtaaaataaatgagctatcttatgagtgacttcttaagtaggactcaaatcctgactgattattaatagattatagtctaaacgtctattataggtgaaaaatgttggttttagtactcccaacagaacatacatagcgggttttgtatgtaaataacggaaagtagctcagtttggtagagtactgcatttgggatgcaggggtcgcaggttcaagtcctgtctttccgatagaggtaaacaacttacattgttgctgacaacccttatgacgggtctagtggatgtgcatagaagctagataggaaaaatacctcaagagccttaatgttcggtttgcctgtagagaccactgtgtaagcagtgagagcagggttttgttagatgtggctcgtcaataacctaatacatcacaatatggcgtggtagccaaactggtaaggcactcgactttctatcgggcgattgcgggttcgactcccgtccacgctattgtatgaaatggagtataaaccataggtctgtctagggtagtgagaaaccaataaggcagtaaatacaaatgttttaaggagcttatgtgttcggaatctcactacataagtgcaggctctgtatgttagaaggttcgattccttgtctagaacttagtggtctaagcagtaacatataccttataaaatattcctgatattattgatgcggtgtagagtactggtaactcgcaagcctcataagcttggatatgtgggttcaattcccaccaccgcaataaacatattacactatcagaaagttacgctttttcttgcttttaagaaagtagtatgctatagttaagtcaaaccttagcaggttaagatacccaagaggaagcaagttgagggtatgtgtgtttactatatacgaaggttcctagttacctttcggatatggctaatgaaaaactaggttcattgaggtgtagctcagttggtagagcgcacgactgttaatcgtgttgtcgcaggttcgagccctgtctcctcagttaatcacatataaactgaacttacagcagtggtgggaagaatctgagctaaatgatatgcacatttggcaagagaccgtcgagggtagagttggaaggcatttcagacaagtcccctaaagcgtaacatttctagaggtgagagcttctgttatgaaatgttagaaatatcggaaaatgattctatatatgtgattagttataggttcttggtgtaacggtagcataaacggctccaacccgtttggtgtgggttcaaatcctacagagcctgtttttacttaggggaggtagctcagttggttagagcgctagcctgaaaacctagaggtcggtggttcaattcctcctctccccataaattgagactgcattctacggaatcagggtggagcatacccacaggttgaacatactacagtttacctaggatgcttcctaggtttattctcaggtagccaaactggtaaggcatcagactttgaatctgagtattggaggttcgaacccttccctgagaattaggtgcctagcaaagactgagttcccgaatgggagtaaggttacatactgttaaagaataaaatctttaagggtcactgtatctgagaaacctcatgtctttgtatttttaattagggggtcaacaatgaaaatatttgtagatgacttacggttagcacccgaagtttacgataaagctttcacttcaggagaagacttcattcaatggttgtctgagaatcctaatacagaggtggagttactgtccttagaccatgacttaggtcaagatgtaatggacgggtatactttaacccgagagcttgttagtttagaaaataacataaaaaatgttcaatttcatacagataatataatcggtttgaaaaatatgtactactacttgactaatgctaagaagcatggtatgctacctaatatggaaaacatatatggacataaagtagagtgcattgatggtaaagaatctattgtaccttataaaatattctaggagggtaacatgaaaaagtatataacttcagattggcaccttgaccataagaacatttgtggtgcagatggttttgtaagcacaagagagcattttacttcggtagatgatatgaatgaacacatcatctctgctatcaacagtgtagttaccaactccgatgagctatatcatcttggggatattggaatgaataacaaacccaaaagagtatttgaacttttatgtcaaataaaaggtcagatacacttgtttaaaggtaaccatgatggtagtaaagttctaaagtacattaaaaatcataattttaatctacccgatgggagagagaagtttgttgtgtacgaagttggaaccattgttaaacgagatggcgttcagtattacctaactcactatcctatgggcttaggggaatatagacgtaaaatgcgttccatttgtggacatatccatgaacaagaggctagggaagctaactgcattaacgtaggtattgattctcctgagctacctgttaaccaaccttttgctgtgcctattgagttagatacggctatggatttggtggatacaaaatggaataaatggtttgaacaaattagtaggttaacttctgattagcttacttatggaaagtcttgactattggtaggtctagctagtttgctaaactagtggcggttaaacgtctaggggttcaattcccctactttccttttgcttagttggtgtaactggatagcacactacgctacggacgtggtaatatgggttcgagtcctgtactgagcgttaagttgaggatatatgattttatagctattggtctaatcattatgaaaataatgcttcctatgaccactgaatgcctatcaggagctataattaggcaatcatctcaactttaaaaaaaagtgttgacacatactaaattatgtgttatacttaattcataagttaacaaatgaataatcttgaatagttggtgtatggctttggtaacacaccgtaagaaattacggagcaggcagttcaaatctgtcagtcaagacctttagtttttggttagtatcctttttcgagtaggttatcttgaaaaataaatctgcgtttgtagctcagttggttatccgaaaggtgtagagcatccgacttttaatcggagggtcacaggttcgaatcctgtcaggcgcatagcactgtcgcaattactgtattctataggaagaaggcacatagcaaatggaacaaattatcgcaacaatattaggtgtaggcttaacgatgagcccgctagttatgttactagtagagacattaaaagcacctaatgttattcctaatcgttggctctcttgggttagcgtaggtgttggtgtagctctcagtatgtatatgggactactaatgcctgacttgggttcgtccctagcacagctcgcactgtcaggtgttgtagcaggtacagtagctagtggtatctatgaccaagtaaacaaaggaaaagatgatacacaacctccccttgaccttggttaagggagacctgcccctttagttcagcgggagaacgctacccttacaaggtagatgtcggtggttcaattccatcaaggggcattacaccacatggagttttgtagctttctcctttgaaaaaaaatatagcaaacatcacctagggttactgctaaacgctgaccttaagtggtataggcttactcagtttgtaagcctcacgcccgtgtagctcagttggtagagcgcccgccttgtaagcggattgtcaggagttcgagtctcctcttgggcatagcaactgtaaaaagttgtgagcatagacatttctcctttagtcagctcagtaaaatgggctgatatgtggacttagtataagggtagtatctttggcttccaaccaaagggtgcaggttcgactcctgtagtccatatactcgtgttacccaccgcctctgtatatgcgaaccgagggtagcctataaggtcatatgtagatgttaagtatataaagctgaaagtatgaggtactttttgaagaaattacttaacatgccctgccaatatagtataagcactacctcataaaagacttttactatgttggcatatacataaaataaactttggaggaaaccacaatgactgaaactaaacaaactaagaaagcatcaactaaaaagaaagaactggttaaagaacctttattgcaacatattgacttcactgagtatttatctaagaaccctcgtatgcgacctcgtaaacgtaagtcagtgaagaaagcgagctaaaatttggcacttagtgccttttgctcccgtagctcaattggatagagcagaacccttctaaggtaaaggttacaggttcgagtcctgtcgggagtgttaaagattactggaagctcttaagagcgtttgtggattgtgagatttgcgattacagtttgatacctaaggtaataacgtgcgcactactgagggtagaaatctttatctatgcaggtgtatcccaactggcagaggagtccgacttagaatcggttcagtaagggttcgaatcccttcacctgtattggagagtggttacctctcggcaagaaatgataactaggagttagagctacatctcggcaagaaaaagtagctaatatgttattaatgtatctttatcatacataataggtctagagttcgtcctaaggtgcttgtttgactggtgtttggtagaagttgcttagcaacaacagctcaagaaataacttaggttgagagctgagatacatatgtgttcggcaggtactcaaacggtaaagagggtagtcttgaaaactactaggcggtaaaacgtgcgtgggttcgaatcccaccctgtcggtattaagcgctgtacaccgctctcagacgtgtataacttaacaccctttatgatagtattgcatcatgagacctttcagggttaggaaaaggtaaaccgcatctgtggtacagacccacctaccacattctcataacggttggcgttggctttgttacgataggagctaggtttttcggtcacgtttcttccttaaaagaaaacgtgcatattgtgtatctgaggtggttggtattatgaggatacgtgttactctacgggggcacgggtgtgtaagatacacaagttgggatattagctcagtgggagagcacctgccttgcaagtagggggtcatcggttcaaatccgatatgttccattaacctaagtggtagttcctaaaccgcaacttcatcttttagttggtgcccgtaagttgtcactctgagaacagttgggacttaggttataacgggtgtgtatgcaagatggataaagcaggcagactgtaaatctgttctctttagagttcgggggttcgaatccctctgcgcccattagagcggagccgtccgccgtgtaggaactgccttgtgaaaagaggtagaactattggtattctctgacggagagagcgtaggttcgattcctaccctacacataatagcacctaggtgcttaattttttaaggaggtagtcaacatggacaatcaaatcgagaatatttttacgtaccatgcacctaaagaagggcaacctgagaaatatactgcactacgtgaaaaagcaaaagaattagcatacttgattggttctgaatgccctgatagtcgagaaaaatctttagctattactaacttagaacaaacgattatgtgggctaatgcaagtatcgctcgaaactaataacttataggaggactggttatgaactttttaaaatatccatcgctaacaaatcattatgctttaggtaaagatagacgtattccatatgtgtatgatgatgtatggtatgctacagagaaaattcatggagctaacatctctatcgtaactgctaagggaactgaagatgttgggctagctaaacgtagtgggtttcttaccctagatgacaaacagtttggtgggtttaaaacatgggtctctgaacaagggtctgaattgttagcctcactaaacaaatttttagcttgggaaggtgttacacaagttcatgcctttggagaatacttcggaggaaaagttcagcgtatggactatgaactatgcaaacaaggtcaagtagacgttaaactatttaacgtaatcttagaatacgatggtggtacaattcattatgttgttagtcgggacatgatggaacaatatatccctgccaagtatttaacacctgtttcaaacaagaaaactttacgggaactagttaatgggcacttagaagtacaatctatctatggtggtattagcgagggtcaagtatatcaacctactaaagggtatgtgcttaatgacattttccgattttatggtattaaacataagacaaaagagtttgcggaagttactaaaagtaccgtaaaggttaaggagaaggttgaatattctcctgagttcttagctcttgttgaagatgtatctcggtatattacggatagtcgtctaaacaatgtattgtctcatggtgactttgagttggagaacaaaaacattggtgctatcatgactgctcttaaacaagatattgtgaaagagtacctagctgaggttgacacaacgcattcagataccgatgtactttccgcagtgaataaacacaatggtgctattgcattattgattaaagaagcgattacaaaagaaagtaatgaaatgcttggaaaaatttaaaaattaattcaaaaaagtgttgacaaactttctaatacatgataatatgtatatatagacaaggaggaaacactatgaaatttaatttttatactcaagcaatattaacaactcctactgagtggagtaattatgaacgtcacttcactcataaaggagtaacaaactttaacagtgggcacccttttgaatatcttatgttcttacaatcctttgcggaggcgttaggctccttaggtggaggcttagttgaattagaacctcatattctaggtgttgtagacactacaaatgaaataatagcactagtcgagttatcatagctcgattacggacatgtagctcattaggtagagcaccccgctcataacggggcggtagcaggttcgaaccctgccttgtccatagtactgctagtcatttgctgttcgataaagaattttcgagggtttactatatcatgcagacaatgtaaactttgggaaacagacccctcatgcagaaacgggctgtagtaaataactagtagtacacctcttgggggtatagctcagttggtagagcaatgtgttgataacgcataggtcggtggttcaagcccatctgcccctattgacctagaaaaagtctgatagcaatggtcacgctctgtgtattgaggggtgaatacactatcttggttgttgtaagagtaaacgacataagtgcctctactctaagcgcttaggtggaggtcaattatccctgtggaagccaaactggttgaggcatacgtctgtggaacgtagtaaacgggttcgagacccgtccactggatttgaaaaggttgaatggtcttggtgactagttggggaggacatagcccctaattgcgaagggttcgaatccctcaatctttttagccgagaggcaaataaaatatacattacggggctgttcttggtatcgactatctattgagggcttcaagttcaagtagcagacgtgcttaaacgtaaactaaacataactgcaaacaacgaattattagctgtagcctagtttaggctcagtacacgtatactagggagatatgagcctgcggaagctccttagttaaaaaaagtagcaggatacaccaacatataaccttgtacctgttggaagagaaaacaaggtggggcatactctagtaagcataacgcacacatacctatctagaggttccaagtaaaaatagtggtatgtaaaaaacttgtagacgacttggggaagtaaataggtaacacaggggttcgactcccctcagctccatacatggctttggactatcaggcactgaacacttttctagataaattgtttatcctttggtgatagtacttgtgcacaggtttgggttcaattcccatcaaagcccttataattaatatctaggaggatggaaatgtcaatattaactactaatttcttgcgattaaaaaacgcacaggacaatatcaatgcagttaaagaatcaggtggcactgtgaaagatatttcagatggttaccatacatttgatgagctctattttcatagaatggtgctgtctagtatagtatttaatgagcataaagacgttgcttggaaatctaaaaaacatcatgatggtacaatgtttggtgacgatgacatgtttattgtaggggttgaaacacctgaaggtcagtacagctaccactataagctagagcattgggatttatttgatgttcctgagctagaatatgctcctgaatacgatgggcatactcctagtgatattggtagactattctctttataggaggttactatggtagaggaactacttaagttatccttggaggaacttgaggagcttaatgctcaactaacaaaagaactattgccttatcatcccttagtaatggctgtgatgaggtaatcatgcgggtgtggcggaactggtatacgctcaggtcttaaaaacctgtgtcctttgtgacatgtgggttcgaatcccaccacctgtatacggactgaccatcctttattatctgtcactaccgcctattcgaagaggtctagtcgcagatggtatcaatagaaggtgaaatgacaccaaagcttatcggaagcactcctcgaacttagcacgaagacggggagataggtcagggttgctgtgctaagcagtccttacattaggttaaaaagaggtactgtactcggggtgtatgacatgcctgaggggttcccaacctctgtagcttagtctcttggtagagatgttcctagctagaacagcgtgtaggttcgattcctgcctaagttgtaaacttttagcaaaaaagtttaaaaaagtattgacaacagactacatacatgctatactaagtatgtaaccaaataacaaatacaaaggagaatgaacatgaaagctaatggactattacaaaaaggattgcaacgcagacaatatcaaaattatgtgtggggaattatcgcatcaaagggacgttctgctcatcctaaatcacatatctacttaagtcaagcacataaaaataaaaaattagcataaagtacttgacaagttatagaaactatgttatagttaacttataggaggatgatacacatggcaaaagaattttacggtgtagttgaaacttcaactacagttaaggaaaaatatacaactaaaaacaagcgaggtaaagaagtagttaaaacacgtaatgtgactgtacctaagtcaatgcttgttaaaacaggtgaaagtactcgtgtacgagctatgcaagttctagaatctgtagctaagaaaaacaacggcactgtttctgtaacgggagtattctaataataaaaaatctaacagcaactacacatattaatggaaatcttgttatcgagggttcgaatccctcctctgccacaagcagagtagccaagtggtaaggcacgagaaaaataatatatagatttttgtaaatactcttgacaaaacacacaaacatgtggtataattaacttataaagaagcctacagcaatcacacaaacaatctaatactgaagactagactatgactgcgcttcttgtttaaactgaaaaaagcaatataaagaacgacactgcaaacttacaaaaaaactataaaacttacagatgaagataagaggagctacagggactgacctattaccctgtagtcacaaataaggtcagcgtaacggttttataggtaaatccttgtaggacgtgaaactacaataaaaatctaaatctcgttcttgtgcttttaatatttgaaacaaacctttataaataaagaacccaacagcaattaaactattccatcaggaggacgtggcgcaggttcgattcctgactcccctattaccctaagggtacgatacaaactactatttcaggggagtagtgtagtggtagcacacgtaagtagcggttcttgtagcaatcatttaccaatttaaaaataaagagactcacagcaaatactataatagcctgttaagctcggggtcgcaggttcgagtcctgcctagggacgttatgtccttggtagctcagttggtagagcacgtatataaatgtctcttgtagcaattataactaaatagaaataaagaagctcacagcaaacaactaacatacaactttgacttccactcaaaaggtgtgggttcgaatcccacctaccctaacgagggtagtggtgtaatggtagcatacgtataacagcttcttgtgatattatgactttatttaagtatgtctatcacaatgatatggcatactttttttattaaaaaatacctttaggagggtgaaaacatgactaattttttagatgctttaaagcaggacacaacagaaacacacacagaaaacggagctttgacgtacagttcaactctgaacagtaacttagacttctttgctcaagcaggggctatgcgtactcgtttagctgaagtacctagtttatttctagatgcgtattctgaggacaaagagttagctcttcgtaacttagtgcatctacggaacattcgtttaggtggtttaggtgaacgtgatgcctttagaaattcattcgatgcgttagctgacaatgataaagaagttgcagaaaagtttgtagattatatcgctttcatcggtcgttgggatgatgttgtatcagcttatcaacacgctgttaaaacaaataacacggtcgttcgtaaagctactgtggctgtaatcaaagaaacattaacagaagatatgttagctcttgaaaaaggtaaacctgtatctctgttagctaaatggttgccaagcccatctacagcaaacaaagaacgtagaaacgtaggtttccgccttatggaagacctaggtatcaagtatagtgataaaggtagctatcgtagaactttaagttcactacgtaaagaaatcggaatcgtagagcaaaaacttgcatctaaagattacgataacattgagtttgaaaaattgccttcaaaagcattattcaaatatcgtgaagctttccgtagacatactcctgaacgataccaacgattcttagaccgtgtagaagcgggagaagttaagatgaatgcgaagaacttgttaccatacgagattattcgagcttatcaacttaacggttggcatacacctaacgtagaccaagttttagagttatcttggaagtctctagacaatgttctagaaggtatcgaagacaacgctattgttatggcagacgtatcaggttcaatgtcaggagaccctatggatgtatctgtatcgttagctttatattgtgcagaacgtttgaaaggtgcttataaagaccatttcattacattctcaggaaacccaagcttggttcatgtaccatcgaatcaaacattgcgtgaccgtgctcgtaaagcttaccatgctgattgggatatgagtacaaaccttgaaaaagcatttgacttaatcttaagaacagcagttaaacatagcatgaaacaagaagacttaccaagtaagttaatcatcgtttctgatatggaatttaaccgttgtatgcggggtgcagacattactaacttcgaaaatgcgaaagcaaaattcgaacgtgcagggtacaagttgcctgacgtggtgttttggaacgtagacagtcgtcaaaacaacacaccagttcgtcatgacgaacgaggagtagcgctagtatcaggtttaactccaaacatcttccgtcaagtattaggtgcagacatcgtttcacctgaagctatgatgctagaggttctaaacagcgagaagtatgacttcgttaaaagttgtttataaaaattagaccttcgggtcttttttttataattatgtgttgacttatttaggtattcgtgctatacttattttgtaaaggaaaggagctaagaatatggagaagttgtctttcattgaatcactagtgcactcgacactattcaatcctaaagcggactatgcttcaagtgataactggaatattgagctcatctatgatatgattaatacagaagagtatcaggatgtcctagatttacaagtaatacataagcagtgggatgaaagtgcagagtttgaggactgtttattcggtgagttggctatgttggatgaagatttttctatgggaacgtatcaagatactatagctgaactatcttcatttggtatacctattttggaaggggagtatactgtagtaattcaggcacaccctatatttcgagtagagccaccttattgggagtttgaaggtgatagttggatagagctatctaacgttagatggtacatcttaggctatgacaagaacaataatacttatgttaagatggggggtaaatttgatgactgaacatttgcggttaaaagagtatagagaaaaacgaaatctatctctgcgagatttagcaagggaattggatgtaaatttctctacgctatcttattgggaatcagggacaaaagttcctaaggcaaagaataaaatgaaattagcacaattcttcggtgtaagtgctgatgagctattaaagaaaggggagtaacatggggctactaattattttactagtggttctagtttattacttactcatactgctaggaactcactttgagaagaacgctaaccattatatgatgaaatttatggcaaagtcaggtatgaatgtacctgaaatcccatatcaggattctttagaccgaggagaatatatagcttgcaccacaagtgcattgatacttttaggtgttctacttttattttactttggtgttgacacaggagctatttaatgatacactactaatataaacttaaggaggaaacaaacaatggatattaaaactaatttacaaggtgggtatgttccaccacaaggctacacaccacccgtaagcaagccaacaccacaagatatgtttgtcgtagcaccatctttagatacggaaaacttatcattagaaggcttcaaggactacatgcaggactatgctgaattagaccgagttgctaagttaattaaagagaaacaagaagctattaaagaagttgtgcttaaaggaatcaaagaactaggaatggactctgttaaaaatgagtacggaacctttactattgtacctaaatcagttgggacaactttcgattctaaagcatttaaagaagatgcaccaaaaatttataacatgtacttaaaagatactagtaaaaaagagtatctgaaagttacagctaaaaaagtaaaataactgaaaaggagaaaatctatgctatcaaagttaaaaaaagaaaaattagatgctcgtaaggcaggagacaaaacaaagttaaccgcaattgactttgttatgtctaagctagacaaaaaacgtgtcgaagtaaaagttaagacagtggatgaactttcagatgagcaagtccaaaaagctatcgagtctgaaattaaggaacaaaaacaatcgttggagtttactaaaggtactcctgtaggtgatgataacgaagcagttatcaaatatttaacatctcttcttcctgagaagttgtctgaagaagatattaaaaatatcctaagcaagcataaccttttatctgtagacaaaacgagtattggctcctcaatgaaagaagctaagaaaatttttgcaggtgaatctgtagatatgagcttagtgtctaaactagttaggggataactatgtttagtaaaagttcccttggtattcaacggggtgtagacgacaagataactactagaattgaagggtcacctacagaggttctagtgttgttgtctacccttaatgctaaggtcatagctgagctagcagaaacgccaagagagtatgctaagtttagcaccaaaatacaagaaaacacgatgaagatgtatctagccatcttatcggagtctaaggaggataaataatgggttgtttagtatttctagtcggtatgttagtattggtagctatcttagctattcctgcctttctaattgcgttagttataactctaatatggacaacgttatcactattaaaagtgttcatcattgtatggttaatacttattgtgattaaaatgttgttctaaaaagtttaaaatagataaggctactacttagtgtatagtcttattttttatggtttagctattggtaaagttgtgctatactaatattactaggctaaaagagagggtgattatattgggtcaagagttagggttattaaacgacttgacagtcatcaaaagagatggcagagaaacaaagtataatactaataaagtgtacagagctattctgagagcttctaaggggcttagagacaatcctgaggagattgctgataagattacctctaagatagaagcagggcttaaacgtcacttaggagcctgtgacagcatatctgtttctgaactgcaagacattgttgagtttgagttgatgaaatctatgtacaaagatgttgcaactgcttatattgaatatcgtagtgcgagagaccgagatagaaaagatactacagatgtcaatgtaactatcaacaggttattagcaaaagataaaaagattgtaaatgaaaatgctaataaagattctaaaacatttacaactcatagagatttaaccgcaggagtggtgtctaaaacaacaggtttaaaacttctacctaaggctgtggctaatgcgcatatcaagggagatattcattaccacgatttagactatcaaccttatagtccaatgacaaactgttgtctaatagactttaaaggtatgttagaaaatggtttcactatcggaaatgctgaggttgaaagccctaagagcataaacactgcgatggctcaggtatcgcaaattattgccaatgttgcctcaagtcagtacgggggctgttcctttaatagagcagacgaagttcttgctaaatatgcagagatgaattataataaacattacgggcaattattatcttttgcttttcctaacgaaaatcaacaaataacagatgtcagtcatgtagtcgaagaggcacaaagattaactcgaaaagatatttacgatgctatgcaagctcatgaatacgagataaacacgctgttttcatctaatggacaaacacctttctatactttaaattttgggttaggtacaggtatttgggaacgtgaaatccaaaaagctattttacaagttcgtatcaaaggcttaggtaaagaaggtcgtactgctattttccctaagttagttatgggaattaaaaagggagttaatttctaccctacagaccctaactatgatattaaacagttagctttagaatgtgcaactaaaagaatgtatcctgatattctaaactatgacaaactagttgagttaactggttcatacaaagcgcctatgggttgccgttcattcttacaaggttggcaggatgaaaatgataatgaggttgctgatggtcgcatgaacttaggtgtagttaccttaaacttaccacgaattgcattagaagctaacggagataaagaatctttttgggagctatttgaagagagattagctatcgttcaggaagctttagtatttagaatgaaacacgttattgagaatgctagccctgatatggcacctattctctataagtatggtgcttttggtaaacgtttgtctagtgaagattctgttaaagaagtttttgaaaacctaagagccacaatctctatgggatacattggtctttatgaggtagcaactgtattttatggtggtgagtgggaagataattctgaagccaaagactttactctagagattatgagcaagatgaaaaatagagctttagaattaagcaataaatacggtgtatggttctctgtatactctactcctgctgaaagtttgactgaccgattctgtagtatggataaagaaaaatatggggaagtcaaagatgtaacagataaagattactacacaaatagttttcactatgatgtccgtaagaaccctacgccatttgaaaagattgactttgaaaaagactaccctcaattctgttcaggtgggtttatccattactgtgaataccctgtaatgacttggaatacgaaagccttagagcaagtatgggactattcttatgataaaataggttatttgggcacaaatactcctatagataaatgccatttatgtggatttgaaggagagtttgaacctacagagatagggtacaaatgtcccacatgtgaaaattcagaccctaagactgtggatgtagtaaaaagacaatgtggttatttagggcaaccgcaagctagacctaatgcttatggtcgtaaaaaagaaattgatgcacgggttaaacatgtttaactcttgacaaaaaaataaaaatatgataacatataatgaaaggtgaagtaaatattatgggaaaagttgtagtatattcaaaagcaaattgtggacaatgtacgttcactaagaaagaactggataaattgggagtatcttatgaagaaaaacgtattgacttgaatcctgagtttcgggatgaagcaattgctaaaggggctatgggtgcgcctttcgtagtaccaccagtaggagaacccttctcagggtttcaacctgcaaagttagctaagttggcagtatagttgattattgcctattacagtattacaggcaatgttaagcggtttgtagataagctatctttaccaagtgtagagatagaccctgcaaaccctttcttatctatagacgaaccttttatcgtagtagcacccacatatgaaagagaccttacagagcctataaatgattttattgaaaacaatgatttaagcaattttaaaggggtgatgggtagtgggaacttgaactttgctgacttatatgtatttactgcaaaggacattgcaaaagagtacaatgtaccactactgtattcctttgaatactcaggcacgaatgaagatatagaaaaaataaacactattttgggggacattaaatgactacgtactttgagcttaacaatcaggttaacatacctgaaaatgatactattccattgcacaaagataaagaagctgttaaggcttactttattgagcatgttaatagaaatactgtattttttcatacattaaaagagaagttagactacttaactagtgagaactatattgataaaacaattttagataaatatagttttaagtttactaagaagttgtttaaacgtatatatgataagaattttcgattccaatcatttatgggagcttataaattttatacacagtatgcaatgaaaacaagtgatggtgagcgttatttagaacgttacgaagaccgtattgcatttaacgctttaatgatggcagatggggatgaacaattggcggtagacttagccgatgaacttattaacaaccgttaccaacctgctacacctacttacctaaatgcgggtcgtaaaaatcgtggagagtttgtatcatgcttcttactacaagtagaggatgacatgaactcaattggacgtaccgttaacagcgcactacagttatctaaattaggtggcggtgtcggtattaatctttcaaatatccgagctcttggagaccctattaagaacattgacaatgctagtagtggtgtagtgcctattatgaaactattagaagatagcttccgctatgctaaccaattagggcaacgtcagggagcaggggcagtatacctaaatattttccatgcagatgtaattgatttccttgctacaaggaaagagaatgcagagtcagctaagcaagttaaaatgctatcactagctcttgtagttcctgataagttttatgaacttgtggaacaagatggtatgatgcacctattctcaccttatgatgctagtaaagcttatggtgttcctttctcttttattgacattacagaagagtatgaaaacatgattaaaaatcctgatattcgtagtaccgtagtaaaagcccgagacctagatgcagagataggaaaactacaacaagagtcagggtatccttatattatgaatgtagacacagctaatcgagctaaccctgtagacggaaagattatcatgagtaatctatgttcagaaattcttcaacctcagcaaccatctgttttaaatgaagaacaagtttatacacagttaggaactgatattagttgtaacctaggctcaattaatatacctaatatgttagaaacctctccatcaattgaaaagtccattgagacagcagttagagctttaacttttattacagacacttctagtattggggaagtaccaacagtccgtaatgggaatgataaagcacatacaatcggtttaggtggtatggggttacacacattatttgctaccaatcaaattcattatggttctcctgaatctttacaatttacagacatcttctttatgatgatgaactattatacactgaaagcaagcaataaaatcgcacaagaacgtggagtttcttttgaagggtttgagaagtctacgtatgcagacggcacttactttgataaatacatcaatgatgagtatgattatttcccaagctatttgcaggtaaatgatattttcaagaatcatcatattcctactaaagaagactggattgagttaaagcatagcatcatgagctcagggctatatcaccaaaatagactagcagttgcacctaacggctctatctcttatgttaatgaaactagtgcatccttgcacccaattacttcccttgtagagaaaagacaagaaggaaagattggttctgtatattaccctgcacctagattgtctaatgagactttaccttattataagagtgcatacgatatttctatgttagacgttattaatatctatgcaagtgctcaaaaacacattgaccaaggaatgagcttaactctattcatgcggtcagctatacctgaaggcttgtatccttggcttcctaagggtggtaaaatgtctacccgagatttgacgttattaagacattacgcatggaagaaaggtattaaaacaatatattatgtacggacttttactgacgatgaccaagaagttgggattgcacaatgtgaaagctgtactatttaggaggacactatgaaagcaattaactggaatagaatagatgatgtaatcgacaaagcaacatggactaagttaacagagcagttttggcttgatactcgggttcctgtggctaacgatattaatgattggaataaactaagccctcaagagaaagaccttattaataaggtctttggagggttaaccttactagataccttacagtcagaagtaggggttgaatctcttcttaatgatgcggtaacacctcatgaagaagcggtgttgaataatattatattcatggagtctgtacatgctaaaagctactctactatttttagtactttcaacagtccaaccgaaatagatagtatttttgagtggatttctactaacaagcatttgcagtataaagctaataaagtagaagaaatatacaaaacagggactcctttgcaaaagaaagctatttcagttttattagaaagtttccttttctattcagggttctatacccctctgtactatcttggacaagcaaaaatgacaaatacggcagaggtaatcaaactaattattcgtgatgaaactgtgcatggaacttatattgggtataagtttcgtaaaggtcttgaagccttaccagtggaagagcaagaggaactaaagaattgggtcgttaatatcgcttttgacttatgggacaatgaagtggcttacacccgagacttatacagctataatggttgggtttctgatgtagagagatttttagaatacaacttaaacaaagcaatggacaatttaggcttatctccgctgtttcctactacagcatctgatgtaaattcagtagtcataaacgggttgtctactacgacaagtaaccatgacttcttctctcaagtaggtaatggatacctgctaggtactgtagagcctgtaactgacatggatttcatgttagtcgataatttagtaaataagtgttgacttaaacacaaaaacgtgatatactttgtattgtaagatacagagtatatttttttaggaggtatttatggaagctgtagcatttgtagtttttcatgaaaagtatccattagctacatttgactatgtagttgcggaaactcatgtggcagtcatatcagaaatgttaggagaagaagtctccatcaaagaagtaccttttgcgaacagtgcagaagcaggtgcggtaatcagcactaaaatagcaattgataaattttctaaaaactaagggggaactaataatgggactatgggctgagcgttatgtagttaaagctacaagagcaacaggagcagattcagtattgatgtttacgtttactaaaaaagaggatgctgaggagatgcttccgattattgcaaagacttttgatgaggatattcaagatttatatgtggatgtactacgacatatcccatcgacaaatatcgaagcacttaaggtaacactagcaggcgtaaaagatattagagatgcagagaaattagagaagaaaactcgtgaagaatacctacgacaaaatcctgatgaatactggaactcctctaaagaagagttttgtaagaaaccaactcctgtgtggggtagatttggtgagggttggtggcgacatgtcacacctgaaatgttttttgaggatgaggactactatgtagacctatttaaagagtttggtggaaatatcatggaggctcttatggttaggggtactcctcgtatggtggataagcataaacgtgagacaaaacggatgtctatttatgaaaaagctattcgagaaggcaagtcagtaaacatcaactctgttggtgggtacaatgactttgatgtagtagagattatggaatcagaagatgagcctagaacgcaaggagaagggctcacaggcattttaatgtacgatggtatcttttatccttgcttatacgggaagcatcacaagctcattcagacactcagaggtaagtatcctgatgaagtgttagactcttacagcaaactagcttctgaagatattgagcagatgatattctttttctctcatgggcaatcacctatagccccatatgatactatctctgttattaatagacaagggcgtactttaagcggtgagtctcttgattggttgagagagaataaaaaatatatgtcggatgtccaaagtagacgtttagacaattatgtaggaggaactaatgagaacatttgatgatttatacatggagctaggaacaaaattattaaaagaaggtaaaccacaggaagatattgagtctgttcgtgcggtatacgcagatggagagaaagctgtcactaagtctatcgagggagtctcttttgagataacccccgacatgggagtccctattttaacttctaaacgagttcctgttaagtctcccttagttgaactacagtggatttggcaagaaatgtctaatgacgtttcatggcttaaagaacgtaatgttcatatatgggacgagtgggagcgctctgatgggacaattggaaaagcttatgggtggcagttagctaacaagacacgaaatattccattagagattgcaaattgggacaactgtgatacttccttgaatcaagttgaatacatgttgcatgagcttgttcacagccctagttctagaagaatcatgacaactttgtgggatgttgacgacctagatgatatggcattggagccttgcgtatggtctactcattggacagttcatggaggtaaacttaatttacacgttaagcaacgtagtgcagatttttgtttaggtcttccattcaatgtttatcaatatcatgtccttcatgcgtatgtagctaaatttgtaggcttagagcttgggacaatgcactggaacatcgacaacatgcacgtatatgaacgtcatattccaactttagaagagcagtttactaagtatatggtagaccttatcagcactaagatagtagaccctaaaatgaaagctcagtttggtattcaagacgttgttactttaaatattcctaaagattttgatatgagcaatttctttaagaacaaattatcagaggctacgctatcagggtacaaacccttagctagttataaatatgaaattgctatctaaggaggataaatatgaataatgatttagctaaagtttgggagatgtgggaggagttatcctcccattcagggaaaaaagataaggtagctatcatggctcgttattttaaagaagaacctatattgtatttcttggttaagtttttagtaaacccttatgtagttactcaccttgggcgtaaaagcttggataagaaagtaaaagaaggggactatgttgagatacccgacttagaatggttaatgatattcctagctgattgtgtaggtgatgataaggatattcgttcaattcaacatatgatggctaactgtgatagtaagtatatcagtatggttaggagcattgcaacgaaaacaggtgttcctttaggtgtaggagttaagttatttaatgaagtgtgtgagcaggaaggtttagatttatgtcctgattttggtgttatgttagctaaagatttaagaaaagaaaaatctttagaatttattactgaaatggttgtaacattaaagttagatggtattaggtgtgtagctgttaaagataagtctttgttaactttttacactcgtaagggtattcctattgaaggtttatacgagttggctaaagagatggaaaacctaaaagatggttatgtttatgatggggaactattattagaaaaccctgagggcttaaacagtggtgatttattcagagcaacacaatcagtagtccgttctaaaaacgataacaaaacagggttagagttccatatgtttgacttattacctgtgcaggaattttataacggcatatcatctaaatcttacgatgatagacgaaaagagctagatgaaatacctgacacagcccatattgtaaaagtccctgttttatatagaggtaacgatattacagaggtttacgctattgctaatagcttaatagaagcaggtagtgagggtgttatcgttaacaactcttctgctaaatatgaaacgaaaagaactaagaacctgttaaaagtaaaagggctatactcaaatgatggtgtagttttagacttttataaaggaaaagaaggtactaagttcgagaataccctaggtggtatgattgttacttacaaagatggaacaactaaagtaggcggggcaatcagtgatagcctacgagatgagatatggaacaacaaagacaaatacagaggcaaagttgttgagtattactttagtgagaaaagccaaaatgctcaaggcacggaaaatgtacgttttggtagacttaaaggttttagattcgacaaaagccctgaggatgtgaactatgaagattaagtattatgcggtaaagaaaggtagaaaaacaggaatatttacctcttgggatactgcgaaggaatctatagaaggttatcctaatgcagagtacaagtcgtttaaagacttaaatactgcaaccagttacctacaagaaacgacatattctgaagatgagcctgatacatactatgcttatgtggatggctctaatcttggaaatgggtctaaatatagcgggagtgctattattgtgtacaatgacaagatagtagacgaagtaagcctaagtggagataaccctgattttacacctaaaagaaatattgcgggggaaatcatgggagctctcttagcaattcagtgggcaaaagataacaaggtgacagaattgattatatgtcatgactacgtaggtgttggtaaatgggctacaggtgcttttaaagctagagaccctttagcaaagatgtataaacaacaagtagaccattgcatccaatcaggcgtagaccttaagtttataaaggtagatgggcacacaggtcatgtgtataatgaacgagcagatgttgttgcaaaggaggctttgggtattgcaaagaagtcgtaaatatgcaataaaaggagctaatgacttttattacattacagggttacagttgtatgcaatgagcacaggtttaggtgatgcaaggttatataacgacaaagaggaagctacaactagaatgaaaaccttaaacaaatatctgccaaaagagtacaaacctttagaagtagttcctgtgactactttagtacaggagggtatttaattgggtaaacaacaagaatggaaagcagacaaatatagtaagtggcacgtagctgactataaaccttttatgttcgttgatggagaaggtgttcgttgtagtatctacgttagtgggtgtctgtttaactgtaaaggatgttttaacaaagcaatacaagatttcaactatggggaaccttacacagaagagcttgaagataagattatagaagacttagctaacgactacgttcaggggttaactttattaggcggagaacctttcttgaatacagggttgtgcactcagttagtatctaaagttcgagacaaattcggtgacactaaggatgtgtggtcatggtcaggatacacctttgaagagttgttagatggaactcctgataaggtagagttactagaaatgattgacgttcttgttgatggtaagtttatactagagcaacgagacttaaccataccttttagaggaagtcgtaaccaaagagttattgatgttaaaaagtccttattagaaggaaaaactatcgaaatcgaaaaatatatgttgacttagttgacaatacgtggtatactctctatataaggtagagagtatatttatttaggagggtaaacatggctaaagattattttacaaagcacgaacgagaagaaacaaaaggactaactgccgaacagattcatgagacactagcatacatgacagaccacggaatgataaaagagaagtttcctgaacggaaagagctgattggtaaattagtccaacataagaaatcaggagacatcggtaaagttacttttagtagctttggtatttctattgcaggggtcaatgatgatggttcacattggcaaactttaggggatgaccctaagtcggttatggaacaatgggaggttgtaggcgatggggactagattaacagttgaagaggctataaagtattatactgatagctataaatgggacttatgggcaactttgccacagactcaaggcaaacaatacattgatgacataggtgtaaacatcatcctgcatcaaagttcgggagatttcgagttagtttataaggtaccccatacagtctttaaattagatgttagagcaggtagctttactaatgttgaacacttcactaatatgtatgttaaatttacatctattgtggctagtattaatacgaaccctttagtaaatatattttaaaaatattagtgcgcagtgttgacttttaaacggatataagttattataataatgtaaggaggacaacaatgaagaaagaatattcagtactagaagagaaaaagctatttgaaggtgtcgtctttgatgtagtagaacgagacattgaggttcgtgtacctactggtgatggcttagatgaagtagaccatatcaaacgtcaggtagtgacatacggagactctgtacttattgttcctgtaacaaaagatggtaaacttatgtatctcggagaagaataccgtacagtagttaatggaacgcaaatcggtttccccgcaggtcgtattgaccctgaagacccaacatatgtaactgctgttcatcgagaattacgtgaagagttaggaatccatatggcagaaggtacccaacctattcacctatttagtgcttatgcaagtttgggctatacattagagcagattcatgcgtatatggtttacgtagaccctattgatgaagatacagagttaaatacggaatttgatgctgatgaatacgttgagcttcgagttttgaagacaacagatgttgaagagttaattcgtaatggaattatcaactctatgtcggctcagctagcttttatgaaagcagttgatgttttagctaatgaagatatttaggttaaaaaacagcgctaattctacttggcatatttccttcgaaagattaaatggtagagattatagcctatgtggtaatgctgatattaaatcctattttgaaagtcaagctacaaatgagaaagacatttatgttgaggactttaaagataatggtaggctttgtccgagctgtgtgctgaaagcttaccaacatgggttggtatccgttaagaaaatagattaaacgtaaaggagaaatactatgtataaacgaggtattgtagtaggtaaatttgaccctcttcatagaggacatgtagacatgattcagtgggcatcgggtaaagctgaagaaattattgtagttattagccatagtgacattgtatctgatgctttatatgcttcgtctaatttaactaagaagctaacaaagtacgataaacttaagattgttcaaaaaacatttcaacaacaacctaacatttatgctgtattaattgatgaaacggattgtcctatgtatcctgatggttgggcaagttggtctgatttggttaaggaaggagtgtcctccgtagaaggggtatctattgaggggcaacgagcaatcagcaaaactgcgtgggaagacaccgttttctttagcagtgaacctcaagacgagattaactataaaaaatactttgggtgtaagggtgtagcactgtacgaccctgctagggaacgctctaaggtgtctgcgactaaaatccgtaaagaccctaacaaatattgggagtacttaccacgggctagcaaggagcttttaagccctatgattgaaatatcaggtggtgaatctagcggaaaaactgttatggttgataaactaggtaactattatggaacacctactgtttgggagcgtggtcgtttatgggctaaagatgagcttggtggagatgagcttgcgttacaatcttatgattacacccgtattgctatatctcatcatgaagacgttatgtttgcgaaacgtaatgcaacgagatttgctattacagatacaaagtacgttagtacacaagctttctcaatcacctatgaaggtgaggaaaacgctatcgtagaagatttaattattgcagacccttcggatttagttatcttactagacaactcaacaaaatgggttgatgacggtatgcgtaaagttggagaaccatctaaacgtcagaaattccaagaacttcttaaggagctgtatcatagatataatattccttatgttgaaattaaggattctgattatgcaaatcgttatgagctatgtaaaatggttattgatggatatattaacgattatctatcagttgtggagttacaagaaattgtaaataaggcagaagctaagttcaaggcagacaaggagtaaactttatgtattggagagaccaactagctaaactgaatgtaggagaccctgtatggataaccgagtacactcgggttaataagactcgcagtaaaccctactctaaacttgaacctgttgagggtattgtttatcttaacgagctaggtaaaaaagacattaagtatcaagcagaaggctaccatagagaaattgagttgtttaaaacaaaagaggaagctgtagcctattacaacagttcagtacagcaacattatgatgatatgcttaaaacagcaaataaaataaaaaaatatttaattacagaataggagaatggacatgaaagaagtacaaccaacatttaaggataagtattacagctttatgaacaaagtagcactagaaggaggttcttggcgtaatatctatgtagtaggtattattcttgtagggttagttattgggttcttcattactaattggagtggggtagttgtctcagaccctagcacttggacggaaattgggttcttcattacagcatactgcttaggtgttccttgtgtagtcttcttagctaatcgagaaggaactctaggtaacatcttgggtattttgtctaacatcggtgaaatgttaatcttttggtattttggcacaatgggtatggtgttcgcaggagcttactttggcttaactcacctaatcggtttagttcgatggaacgatgacaagtttaaagatgagtcaggtaaggttaagattggtactatgaaaaaagaacaaacaatctttacaggtatcttcattgtagtcgggctaatcttacttgtgttttttggtggagtattcggatttgttcagggtgcagggacactagggttacttatttggctaggtaatttactaacatttgtaatcagtgtaacagcgcagtttctaatgattattggacttaaagaatcttggacattttggttctcatctaactttatcaacttcttcttaaacttaacttcaggtaatgtttggtttatggctcgtgatgtattataccaagtaaacgcatggttagctatgtatgactggaacattcgagcatattatgctaaaatagaagaaggagagaaagacgtaaaagttcctgcgggtgtacgtgtactcgaatggaataaaaaactagataaattaggagtgaagtagattgagtattatcactacagctagtggtattatgggtatcgtgcctgagaatgacttgattttattacagaaagttcatgtaggtaaggcaggggttaactatttgtttaaagtagataacccccacttagaagtaggaaacgcctatgatttcaactttcagattgatagacgtaaagccctcaaggtatcctatactgaggatggtcacggagagtttgctctttttggtcattacaagaatactactagaaaaataactgaagggacttttagatacttattgcataaggatgctatcaagcttatgcttagagttcctttaactgaaaaggtagacattgagtttattgagcaagcttcttttgagtttatcgttaagggcttagaagagtcggaaccactgtcttacctaggagtcgaagtaaaacctctatcctctgtgttagggacacctagtggagaatagaataattgtaggtataacgggacacagaccacacaagctcatgggtggttatgacccgtttgcttttgagaataagatgttaacctatgttctcaagttggaactagagaagttgttgaggaaatataatgaagttgtgtgcatatcaggcatggcacttggggtagatactatctatgcgattgcctgtctagaattaaaagatgtgtaccatgaccgtattaagttaatatgtgcaataccttttgctaatcaatcttctagatggagagctgaaagtaaaacgctatatgacatgatactaagtatggcagatggtcaggtaaacacgtcaggtttagatacagtacctgcacatgatgttagtgctgttctacaaaacagaaatgagtggattgtggacaactcacaggtgctttgggctgtttgggatggaactagaagcggaactgctaactgtgttaactatgctagacaaaaaggtctagaagtaaaaagaataagcacagggcttattactaagaaagaagggtgatatatgaagctaagatacgtagctattgattttgatgggacgattactgagcctgctgagtatcctgcaattggagagctcagaccgatggctaaaaagactatcgaacatttgaaggagaaagggctagttttggttctttggacatgtagaacaggtaatgacttacgtgatgctcttgagtttttagagaaccacgatattaggtttgactatgttaatgaaaaccctgaagagttgcaagatgtttacaaaaacgaccctaggaagctaggagtagatgtattcattgatgacaagaattttgccatcacccaatcagagatagactggcagttaattaagtttaactctgacataaattgggaggtactaagtttagatgagtataaaaaacggtagatattctctagctgatgttaaaggagcaacttttatccctaagaaaggtggactccccgcagaggttactgttatatcagttgcttatggggagcttcctcttacacaggaagagcttaaccgcaatgtttacgcacaacctatgcgatttaggttcgttacttttaattatgtgtgggataatcaggtaatgacagctagcttgaaatggcacaaatttttaactgattatgttagaaaagactggcacgagtattgggtattaaacggtaaaccataggaggagttagtatgggagtaaaaaacatggctttcacaaaggaagacttagatgcactttctgatgctgaacttgtttgcaggggagatagagaaattggcgcaggaacttacaccgacttaggttatgtaggtgaggaagtgttgaaaatatgcaaaagtatcatttggcaatatcagaatgttcgtacaatttcgaagaaacaaagaaaaactttactagagtttcagtattacaatgaccctgattctgattgggactacagcggtggtctttatgatagctttgactatgattatgacttttttgacccaatgttttaaaaaagtgttgacaccctattaaatacgtgatatactatgtgtataaacgataaggagagatattatgcagaacattgacaaaacaaaaattgctatcatttcagtagccgtggtattcattctaggtcttgtaaccttttttggggttaagaatgtagagaaccgagctatcaaatacgaaattaacatcgaacaatctcaaggagatttaaacgctgaggaagttcgtagagtagacttgttttctaacttagtggactctattgagagttataatgactatgagcaagagactttggcgttagtagttaaagctcgacaacaagcagagaatggtaacgtagattcagctaagagtacgctaaatgtagtagtggaacagtatcctgagcttaagtcacaagataactacaagcaagcaatgaaagagtttagtattactgaaaaccgagttgcaagccatcgaaaatcttacaatcgacaagttgctgagtacaaaaagtttactagaacatttgtaaatagaaagctgttatccttgcagggttatgaaacacaagactacgaagttatgagtattcctgttaacccaacaggtcatacagacctgtttagtaaatgagacgggatgagttaaaggttcgatactttattttacctacagttatcgtagcctttatgattatgacaggtatttggattcacaataagatggaagactctaggttagctactaatactatgtatgagacagctattcctgcggatgacaaagactcttatgattatatcttagacacacagcaagggatattctacacacatgggttgtttaccgcagaacagcctgtagagttttctgaaattgatggtaagtatgccgagcttgaaagaagagaagagcactatgttatgaaaactcgggtagtaacgtacacagattcagaagggaacacccacacaaaaacagaaacttattgggaatgggagcattaccatacagattatttatctactaagactattatgtttaatgaccacagttatgattatgacaaattttcaggtttccctgaatcacatatcacaactagacacccaaggtcacatgttcgagtgaagtactacggtgtacctgttaagatggagttgacttttatagctaacgcttcagaaaaaggattgagccctgcctttggtcgaaaaatatatgtagagagtactgcttatgataagtttgtagaaagtaacatctctgacggtaaagtaggaaccatattttttgtaataatatgggtagtcctcacaggggtagcattgtatgggtatatatatctagaagcaaatggatttaattaacaaaaagtgttgacattaactagtatacatggtatactatgtatgtaataaaaaaaataaactaagggagctaataaacatggaaaaagaaatgttagaacaactactaggtattgaagaaactgaagaagcggaagaaatgatggaagggttgcaagcattcctagaaatgttaactggtgcgaatgaacctaagttgcgtgttgtgttaacttttgatgaagaggttgttgaggggtacactcatgataccatcgtagggactgttcgtgggttgaatcgtatgaaagcagaaatcatcaaaaacaaggagattcttgaaaacattgctcctgaaggagccgatggaaaaactcccctttcggaagaagaggttgggttgattcagttagttacagcatatgagcttggcaaacaatttgctaatgactttattgcttctcttgctgaagatgagaaccctgtggtaaaaggtatctccacagagaactatgacgagtgtacttgctcggtatgttctatctccaatcagttagaagaactaggcttgttagaagaagacgagtaacagctaagaacctacacaaaaaagtgtaggttttttttatttaaaggtgttgacttataatagaatacatggtatgattagtatagtaagggaggctagaacatgagtttaattgtagttgacggagacttactaaaaagcaactgcaccatgattatgcaccaagctaattgttttggtaaaatgggtgcaggaattgctaagcaaatagctaaagagtaccctgaggtatatcttgcagatattaactatggtattcctgttggaagtaaagaccgtttaggtaagtggtcaggtgcttttgtaactagtaactacaccaataccccacaattagttgtcaatttatatgggcaatataactacggtagaggtttacagactgattacgatgctttaagttgggctttagcaacagcactagctcaaactaagtcacatacaggtaaggtaggtgtgccttatggtatggggtgtaggctagcaggaggagattggcgtatagtatcaaatatactagaagacatctctgggggtcaaggtgtagatatttatgcgtataaattataaaggagtgaagttatgaaaaatacaattgagttaaaaggtaaatatgctgatgcaaagatgtttattaagacagtagatggagtaactatcggtcaggttattacaatgttaaatgagcctgtgactgagggcggtatcgttagaattatgcccgatgctcattatggtaagggttctacggtaggtacaacgattcactatgataaatctatcaccaaggtggttccttctatcgtaggagtagacattggttgtggaattatggtttcctgcttaggtaagttgaaaaatacggatgctcgtgagtggggtaaactagacaatgtaatcaacacgggtgttccttcaggatttgacgttcgtagtaagcctatcagcagttcagttttttatgcagtagaacatatgcttaagtctattaatgtaaaaggagcttatgaagaccagtttatatctcgtattgcgaactcggtaggaacactaggtggtggtaaccattttattgaattaagtaaagatgaagaagataactattatttgcttgtgcatacaggttcccgaggtttaggtgttaaggtagctaaatatcaccaagatattgcagacttataccacgagaatgacgttaaagggctctcagagctcattagcgagcttaaagcccaaggtcggcataaagagattcaaacagcaatcacaggctttaaacggcaaaatgtaaagcctcagctaccataccttgagggtgaggacttagaaaaatatcttattgatatggagttgacacaacaatatgcggtgatgaatcgtaatgcaattgtggacactattcttaaagggatgggttggacagaaattgaccgatttgactctattcataactatatcgacatcgagaataatactattcgtaagggggctactgatgcccgtaaaggtttgcgattggtaattcctttaaatatgaaggaaggctctattattggggttggtaaaggaaacaaggattggaatgagtcagcacctcatggagcaggtcgagtattatctcgaagtaaagccaaagagattcttagcttagaagactttaaaaatactatgcaaggggtatataccacttctgtagttcaaagtactctagacgaagcccctaaagcttacaaagatgccgaagaaatcaaagaaatcatcactgatactgtagacattgacaaaattgtcaagcctgtgtataatttcaaggctaaataggaggatattatgaatcttttagaacagtatattgtagaaatacatgaggaaaaaccttatgaagaagcttggacagcagagtatgattacccatttgtctgggtggatgctaccattgactgctacggtagtaaaagtagaatgaacagagtttttactaaagatgaatgggaagaatacaaaaagaaagggtatttttgggggtagctatgaataaagatacgattattaaactattacaacaaatgcctgatgacgtggttgaagtccacgtcacagtgcttaaaggtatagaagaccgaaacaggacaggagtagactacgcccattcaagccctgttaaggttcaatctatcgagcttaacggagataaaataattttgcatgggggtaaatcatagtgaatgatacaaaaaaggtcacaactaagtggcaagttgatggtaatttagccgtaatttatcgtattgatgacttactatgctactacacaaaacaaaatgacccacattttaaactaaatcaagaggttactcaaggagatgtggacaaaaaagggttgtacaaggtcacgttatatgagcaagataatttaccttcagatgcttatgtggatttaacctttaattggggtggttaacatgtataaaaaagctaaagtaactcatgtggcagttacgaaaataactgatactttaagaacagagaacatcctgtttacctatggtggtatagaaggggagcttaaagtatatcagaatttaagtaacgttcgagtgtcccttttaagtggagacttcgatgatatgacttttatcgtatctacaggtatgggagacgtgattgttgataatgatagtgcatggttgaaaggagaaaacaaatgaatattgtagaaacttcacgaggaatgttaacagatgatttaaagaaaacatggaaagctgttatgggggaaggactaactgtacgtaagctacgtttattaccttttgtagattattccatcaaaaacggcaatactatccccgcagttaatttagaacctgctgaaatggagatattagagcagtggcacgaagatgggcacattttatacgatggagataaggtttacgtgacaatgcctttctacacagctatgcaaactattttattctatggttacacctcatatttagagtaatagtgttgacaatagcatatagaagtggtataattatctaaaatacagcacattaaggagaaaaactatgagttttgttaagttaagaaccatttttggaggaaataagagcgcaacagatattaaaaagcagattgaagctactagtgaagaagaaaatatcatgattactcgtctaccaaagaagacattcgatgatattaagtggaatacagataaaattattgtaaataccgcagaacaagcaagaaatgtccgtggaatccctactttgacctactgtttatccagtcagacagcttttatctaccgtagaccagtaaaatcgacattatcagtagccatcacttcagcaggtcttgctgaccgccatatcgtagatgaagttggtttaactgtacttttaagtggatatacacctgtttattttaacgatattggtgtagatgacattcaaaaaacattaaaatccgttgatgccatcaaagaaagccatgcaattgtatctgtacaaggttttgaaggggcgcttcctgtaattttagcaggtttagtggatttacctatcattgcagtccctacatctacaggttatggagtatcctccgatgggtacacagcactgaatacagcattaacttcatgtacttcgggtatctcagttgttaacattgacaatggttttggtggtggagctcaggcggttagaatcttaactcaaattgaaaaactatctcgattcgatgcgcagttaaacttagacatttaaggagagtaatatggaaaaagagatattagataacactgagttgctaggtcagatttgccacttggatgatggcagattatttattattttacctaatgacaagcaagggtttagtgaccgaaaagcagtgtcagaagttcacgacatatatgctcggttccatcaacaacaatctaaagaaggctatgttaaaggtcatggagatgttcatatctatgtgggtcaatcattaggatatacgaaacaaaataccttcaacgataccattcacagaactgtaatattattagaatccgagctatacggaatgaaagtaaccaccgtattggaggctaaagatgattaatattagtagacgaataatgggatttaagtctcatgattggaagcttttatggttcttatttaagaatatgcacattcagctatttaaaggtgattggttagaggcatatgatgcttggatgtggatacgggtgcatttatcatatgactcaacctatgcacctaatgaggaggagtaatatgacacctaaagtaagagttttggtgaaacctgtattgaaaccttgggttccttggaagtatgttacagatgattgggacaagttaacagaaaataaagatgaggcagagatttttcaagataatgccttgtataaagtacaagactattatttctttagtcgattagattatgaaatagtataaagggggagaaaatatgttacaagctagatttattggagagaatgggtcgggaggattcgaaacaggcaaggtttacacttttactaccaaagttgatagaggtttactatggctgtcagagattgatggtcgtatgtgtgggtattctaatatggaagtcttgttagacaactggtcttttgatttagataaagaaaccgaacctttagctacatatgagatgagagctacaggcaaagatagtacaggatattactacactcgatgggatagagctaccccaatcaaagttagagccacttctaagaaggaagctattaaaaaagcagagcaggcactaggaaccccaccaaggctgtctgacatgtgggcaataactgtagataacattgtagtagactagggggttactgtatgttattattgtgcatggtaataattgcactactttgtgtggttattaccttaggtatcctatgctataaacaaagtaaacgattaaaacggttagaccacttaaaaagtttgcctcttaatgagaagatattgggtttaattgaagacaactatgatgaatttggggatatggcatgggatggagttcaagtagtatttaaccctagtacggaaggggctatgctttcaaatgtcgattgcatagaagaaaatgtgcatgacttctttaatgatatagcggaggagttaatagagcaagagcaagaaaatgcttcagagttatagtaaaaaggtgttgacttgcgtttacgtttttagtataatataagaaaggggaacataatgttacaagcatatatatgttatgagtgggttaccgttaactatgtggaagataatcatgtggttattatagacgaaggaggcttccctaatctataccctattgattctactcgtatccgtctcgttaatacggagcaaaccgtcacatacgcacaaagtattccaaaggagatttactaatatggaaaaaacagcatatctattggttgatattacattagatgacctcaagaagaattataaatcgggcatgacctttgaagtgaatgaccttacatggatgctcacaggaagctatacagagaccgccacagggttgtacagcttagagatggtacttgtaccacaagaagaggaagagcccgtagacagccgtacagaggtcgagaagtttattatggttgtagaacagttcattatgggcggtgaaggcgtttctgatgttcttgattcccttgtaaatgaaatgtccgagaaggaacctacacaggtggatgagacatacttaacaggagatattggtatgatgttttggtatggttgtatggagcgtgcgctaaatgtaatgaagagctttgaaacaaactatcaggaagactacgacttctacaaagatgtgggagtatttaaacctaaggagggtctagatgtcaaatagcatagactacgttacaatacctattcagaaagaacctgagaaatggaaagtattgacagaatctgttagcttgaccttgcccgacactgtttcagaagaagattttagtacagcacttgaaagcactaagcactacttagcaactcaaattgggttaaaaattattgaagcttatggtatggatttagcatacacgacttggcatgataatacgtacaagactagagtgtttacagcttcagcccctgtgggctcataccaagaagtagatatacctattattaaggaggagaatgatggataagaatacaggagacgaattagcaagcgcatggggtaaattgtttggggctttaattctaatggtgttgagccttgctattggagggtatgttacgatgttcttgtggaacgggttaattgctccaacctttggggtgttaacacttacatgggcacaggcgcttgggctagatgtatttattagcttcattactgctaagactaccccaaccacagaagagtctgtatggatgatatttgcaaaagctactgtatcaacattgctgtttatgcttgttggatgggtagtaatgttctttatctaaggaggtaagaagatgattgaggctaaaattagaagtgagtggctacctgttgtaggtattcataatggttaccttgaggtagctgacccctattcaggaaaggtagaagtacactctattgagactacagagtttcaactacgggatgatagcactaatcaagtatatattcgtaactcaaagaactatgtgcatgtatttgatgcagggactttgactaaaccaaacttagaaaggctgtctgtccatgagcagtttagagactaaagagtcgttaatcaatcgggcaaagcaattacctgatatggcaaaaactatcactcctttgtttactcttggagttaaagagttagaggagctatcagaacaaaataggaaaagacaaactttggatgtaaaaactagagacctcgcaagagatattgtttgggaggctctagagttagtattgcctgacgaggtagcaacgtatgaaaagtataaaactgcaaaaactgtaatagttaaggacatccctgttggggatactacttttggtagctacctatttcctcacaatgcgattgggttatccaacgaatgcggtaaggaagaactatcaggagataaagctatatcctacgggacagtcaaggctatagagagtttgagcagtagaaaagttataaaacaaatgaaggaagcgcttacattataagtgcagaaagaggtaaaacatgttaatcatcgaagggaaaagaaatacaggtaaaactagtgcactgattgggttagcacatatcaacgaagcaacccttgttgttgcagacaatgtaaataagaaatcagctataaaaagagctaaggaattaggtttaactataaaagaacctatcacttacgctcggtatctagaggttattaatcatgaacatagtggatactcaatagattcagatgagaaatattaccttgacgaggcataccgtttcttagaagaaacaggggagcctaacattgactatccaaacttgctaggatactcacggacagctaaatatgactacttttgttgacaacacgtcaacaaagtagtatacttaggtaagtagaaggaggtacacatgatgaattggtttaaaaacatgtttggtaaaaaggaacaacttattggtgaaaaggaacaacttattggtgaaaatgatgtattgagtgaagataagtccattcttcttaacaggttatcaaaaatgtcttcaaagacattactagataagacaggaatacatcgagttacacctcaagaagctcgtttaagagtggaagagtcgcaacctacaacagcaaaaatcataaatgaagcgtatcataaaatttatgtagctagcaaggagaagcgtactgaagtgactctttgggctcgggatggcttcactcaaggggttgcttatgtcttagcctccgatgggtactcagttagaccttgtaaacctagaggaaatattattgaatggtgggaagtaacatggtaaactatgatatagaactcgtctacgagtttggttattacccgttgagaaccaagattatcccgttaaaactccctatcgttcctgcggtaggtgacaaaataaaggtaggggataccacatatacaataacagagcgcttactaactaatgaacgttccgttataagggtagtctctgactttaataacatgacacgaggagattaatatgctaaattcaagaggagacacattattacctatccatacaaaagttcgtttaacggaagaatcagctaaacatataggtgtggatgctaggcaaacatttacaatagttaactatgacacgagtgctaacagaggttacactgactactatgtgttaggtcgaggaaacacgcaaagatatgtccactacacagaagtcattgaagtaattccaaggtctagtaaacctaaaccaagaatcgtcactgacccacctacattagctcaagtagttcaacaactaggtcatggagaagtcactaatgttagcgttcagagtgaccttgtaaacggagttcatgaagttagttttaaagtgcacactaagtatgtatttcctgaactgatgttgggactattcaacaaaagttcaaatgaggaggttaacgatgaataaagaactatttatgtccaagtttaacaataacgatactgtaagcactaaagtactcgtaaacaatgctcaagattaccttgctgaagttatcgtagcagagaagggttctctttataaaggtactataactagagttgaggggtttcggacagacatttcaggggacataaaagaagtactacctgtaaaggtgactaccactgagttccaagaggttttaacccttaaaggtactaagcaagagcttgtaaacaagctattcgaagcgttaatgcctgagatggaggactactatctagacgtatcagagccgtatacaggggcacttcaggagtataagcgtgtatcttacactgatattgcagagctcgcagaagaagtagttaatgacatgttttctatagggggataaaaatgttaaactcagaaggagatattttattacgacctatcggtacaaaagttaaatttaccaaagaattaactgaacgaataggtgaagacaatgccctatttgtgataacaggttatgatggtagtcttaattatgagtgctctgactattatattgtccattatacggacaacaagggcaatatagattatgataagggtagactcttcgttcactatgaggatgtagtagaggttcctgccgattctcccttagtggtagattttacagatgaacaggtgggtcgtcttaattggtttgataggttactgcaagtactatggactagataacaacatattttataggaggataagtacatggaaaaagtaaatggatacacaattattgaaatcgagtcttttatggacttaggtacggtttgccctacacaaatggagtttgaagacactgaaggtcatgaatattacttccgcctacgtcatgggtatgcaagtttaacggacaccactatcaacaaagatgtcattgagtcatgtcttatgggtgaaggtcttgatggtctgtgctctacatttgacttatttatttgggcagaaagcaaaaatataatcattataggtttacctgatgtagattattctatggtgtttggcttatgagggaggaaattaaaaagccttactcagaggctgactacagagatgccaaagatgcagggtacgatttagatgtttggcaagagtattgtgagtattatggactagatgatgttatagaagcggaggaatagatgtaatgaaaatgttggctaatgatattggagtaagggttatctacgatacaggtgacggtatagaagctaacttacgtgactggctaaataagtacccaaacactattatattggacattaaatttggtcatgggggtactcacggggggtctacaagcaaagccttgattatttatgtggatgatggtaagttcagactttaatataagtaagaagaaagtgtggtgatactatgtttgaacaaaaatactattacaagttaatgtctccaaagcaaagacgttggttacgcatgaaaatggtaaaagagcaagggcataagtgttggtgttgtggtaagttcttggctatgactcctccgcctcacattgttaactacaagtataataagctaaggtacccacctaaaatgcttgagcaccctgttcatctgtattatgacccaaaaacaaatgaatgtatcggtgctgtccacgcaatgtgcaacatctatctaaaaagtacaagataggtgttgacttgtgtattagtccgtggtatactgtaaatataggaaggggatgatagggtgacaaaggaagagtttttacactattattttaacaatgggtgcattgatgagcaagacttagaacaagatgattgggggcgtaccgctcttattgtcatcgaatacaacggtaagttttatagaagtgaagtgtttgaaagatggggagtacattccctagatagctttacgattctaactcaacctattgttgttgtaccaaaacaagtaacggtaactcaatatgtagtcgaggagggtaatgtatgaaacttaagattaagattagccactcaaaagatgacatggacacatggggtgagggtcgcaaaacttactttattgtagagtcaccagtcccccttaaggaggaggctatcggtggcttagctcatgcctatcttagagccataggagccaactatcgagacatgatgtatagagtggaggacttggacgatgatatgtgagctacaggatagagtgttagttagccctgatggtcgtaagatgattatacctatggagcacttagccatgttccctaaagatgcgaacggggagcccatacttggagccttgggagcccgagtagtcaaaagaagactccgacctgacctacagagtgtgcagggcatgtacagagccttaatagctgaaggttggttgctagagcctaggtgttgacttctcgatgagggtgttgactttacgggtacgggtgttgacttctaatatattttagaaataattttgcccaaaaatatgaaccccaagagcccaccccccatatgagatagcccccttagtacggtcacaaaacaacggggtggggtcatcctcaagtataccataggatagccccaaagtcaagccccaatttgaaaaaggtgaaaaggttgcgaggggttgccccccgttccctaagttcttaacacgtccaaaacggttgaaatgtcaagcgttccctctagtaagtcttttgcattcttttgttggttgtgtgtgcctgctagtacatagcccgctaggtctttatataaggttgtaaccatgtctaccccgttaaggtcttgtagtgccttgtaatagccgttgataccgtcatgggcttgtgtgtccgtgataaggttccgtgtagctagtgccaactgattaagaatgaaagttttaaatagttcgtttgagttttgcatttgtaacatctccctttattagtatatacatagtatagcatgtaaggggtcaagtgtcaaccccttttattaaattaatttactagttcattacgtttatttcgtcccataatgagattatagcttccactgtattatagaaagcttttgagttggtttccattgctatatcgtttagttcttctagagtgtctaacaagtcggcaaatagtggcttgttgtcttgtgtgtcgattccataggttttagagatacgttcctctagtctagttgctgattgtagttccgtaggtgtcaactctttcacgttgcttgctagtgtgtcagtccaataagtaagataatcaatttgtttttccatgtttagcacgtccttttcttattatgtattaagtataacaaaaggggtcaaggttgtcaaccccttatataaaagtttttaaccgtttcccttgcatggtttgtcttagtgtgtgccctccttgtacgcctttcttattcattgtaccgatatatttaccatctcggtatatgtgtatctgtttagcgggtctttcatctaatgtaatctcatgcccaaaatgtttatacgtctcaattctttcttgtccttgttcatatgaccaattaataacttttttcatctgctaacatctccctttctttactatattcatagtatatcatggggctttcatggtgtcaacacttttgattaaataaatgcaataataacaaaactttttaaacgttccgccctccttgcccttgtgtgtatagactataaagcctgttgctataaggtcgataatagagagatgattttaattaaataacacttttaccctttaaagtcgtatagtgtccgcccgttctcggttacaatgcttctttttacgtccgttcttctatgattgctagcatgtgccacggcttcccgtatgttcttatataccctttgcactgtttccccactcttaagatataaaacgctgttaacctctctaattcctttcatattaaacgcctcccgctttctagttgtattttagtatagttataacccctaacccgtaaaacctcgctacgggctttataggggctttataaaaactttgcattcttaaatgctagcctaggtattaaaacctcttttgcaaacgatggataagaacgattttcttctataaccttgctaactgttgtcagtctgataatatcaaatttaacctttaagtcgctttttgcttcttgtagtgtcttgtatatagctttttcccttgccttccttgtcagtccaaacttgctatacatgtatgttttattcttatatcttactagtgctattgtaaagaataagcctaatagtttccctagtattctttccattatctttcccccttatcattgcgatggataatcttataagcaacgtacacaatcgaaaacattactaccaataagccaaaccataaaccaatacccgccaactattccgccccctctttattcattgctaaactgataggaataaacaccgccaacacgcccccaaaagttgaaagccctacaattacatctataaccatttataagccccctctcgtgctttctaagcccttctagtcgtttcccttactgtttaccctcctaggtcattccgtcccgtataacatctctaagagtggtttattgtagtgtctgcttacatccccccaaatttcctctataggtgtgcccgcttcccaatccatgaaattcttttcgagtaccgtttcccgtgtgtccttgtcaatgatggtcggctcgtcccccaataacccccaaaagtctgaaaactcaaaatccttcatttttaattgtcttgcattaactgctccatacatatgcttacatctccttattagttttgtgtgtcccccttaagtgtaccatacaccgcccacaccgtcaaggggttttatattacaatactgtttcatctgctaggggctttttaccatgcgcccccgtttgccttttgcaatcagcccccgttttgaaagctcggggcttccttccttgctgtttgttcttctctttaaagtcaacacttgcccccgtgtcgtccttgtgtgtgtcccttgttccccccttgtctttagtcttccctagggtcgatactgttttctagttcccaactagggtcgtaatagctttctctttcttctcgtaatatccaatctaatctatccaatcttgttctcgttctgcttgttctagttcttctagttcctgcgcctgcatttcttgtgtactatagacgatatttcttttttctcctattagtggcattgtttagccctccttgtcctttcttatatatgccccactaggtcggctagttcttgagcatatatgcttatacgttgtcttgtcttgtttgcttgttcctgatagtattcacttgttacgccttttcttttctgttcctttaagaggtttcttgctcctcttatacagtcttgtaactcttcttgccttcttactgttttacgttcgttcattgtttacacttccttatttatatactataataattgtagcgccttctatccttatatctgtaccaaaatagctagtttgttcttttgttgttactgtttgtatatctatgcttacaatctctttgccttgttcttctaattggctagcatactgattgcataatatttctagttccttttctgcttttccgtgtgtgtgaacatatgtttttattaatgttctcattgtctagccctcctctttctgatatagtaaatgtaaccaataagaacgcttgttcattttaaagtaatattgatagccgtcttgtttgctttggtgtaagtttaacgttctttctttgttgccgttgaataagtcaataactgttaccttgcccgcttccttgtcaatgtttgtgacttcaattgatggattgtataaaacagtgtctactagtcttttcattgtttacacgtccttttctttattatgtaattagtttatcatggttaggaaagaaagtcaagtgtttttattaacttttttaaattaatttttggcttgctttactaactaagataagtatataataaaaggggctgtttgtcaacccctcttattaagttttttatacgttgtaagaaaattcatcaatgctaggtctgtaacggaatgaacccgctaccccgtaatgccctagtaagaagttcatagaatcacggtcggaattgctttcaccataccaataagaaacgcttttgcttgctaggtcaatctctaatgttttagtaccccaatgccttaaggttaccgttttaccatcgttttcgattgcatatttttctcttaattcttcaaaatcacggctgtattggttccacattctaccgtttaaaattgcttgccctttgttttctgctttcactactaatttttctaatgttttactcatgtttgacacgtccttttcttttttgttttgtttctttactatatacatagtatagcatgattgtttttctttgtcaacacttttgattaactttttttaataagttttagcaagcatattcttttaagtatagccccgcttcttttaggcttgcaaaggtttttgcaaatgataccccgtaacgagtataacaagcggtatagttttttcttccttgtctgataatatggggttgtaaaaatggtatgttctttgagtatctgctagttacaaatggtttgttcatgtttagcacttccttttcttatttatatacctagtataacaaaaggggttttgtttatcaaccccttttattaatttttttaaatattagagaatactgtttcaaggtcaactaatggattgactttttcaaccgtgaaagtatagtctactaagtaagccccgttttcatcaggtcgtgcttcacggttttcaattactgaaaacataccataagccccattaatgaaagaaaggtcttctgattgtaattcaagccccattaagttattaatagccgttacaatgctttcagtgtttagcatttcaatttcttgttttaaacctaagtcttttgttcctagtgcttccccttgtccttcttccccccatgatgaaataattccgtcaataattgtcaatttgtagttttccatgtttagcacttccttttcttttagtatatacatagtatagcattaaaggggtttaaagtcaaccccttttattaactttttttactaatttatttcatgtttgcaatgtggtttatattgcctttatacaagaaacaattttcatcattataggcgttatatggtagcgtgttaggtgtcccgcttgctgtcccttgtgctgttagtgtccccgcttccttgtcattactgataatgatttcaatataaccaaactctttggattggataacgtcccccgcttctaaactctttgcaatggtttcattaattttatacattagatgatacccccattccattttttaagctcggctataatctcggacggttttacgttttcatatttataggtagccccgttatatttaatgatacatgattcaattaatttgttcccttgttcttgtgcttgtttgatttctgttagttccatgttttacacttccttttcttatttatatacctagtataacaaaaggggttttaattgtcaaccccttttattaacttttttaaattattttttcttgctttgttcacggtcaaaagctacaatattagaaaagaattgattttcgatatatggatatttttcttttaatgcttgtaagtcgttttctagttcgttaacctcttctagtgttaaattgtgaaggtgtttcttgtcccatttctcataaaatttataagctactgaatttttaggtaatacgcttttttgtgcttgtcccgcttggttccaatcagaacgaacatagttaagcacgcccgcccccgttgaaaaataaggcgcttggcttctactatctaagcccccaaaagtaacctcgaaaaatttcttttttgcaatccgaaaagctaaagtgatttttttgtcataccctgctagcccttgcgcttctagtgctttgttttgttcttctactgtttgataagttgtcatgtttaacatctcctaagttttttattttgtttctttactataatataagtatatcaaaaggcttttagtttgtcaactgtttttattaactttttttactaagttttaaaacctttatagaaaggggaaaacgttcccccctctaaaaaattttaatagtcttctagttccgtttgtagtgctacaatttcagcacttgaaaatagtttatcaagtttttcgttgtttctttgaatgtttgcaaaaattttgctaccttctttataagaatagcctaggtcgtcaatcagttcctctaaggtatagttataatcacgaaccaaactacctaacaagtctttaacgcttggggctttgtcccaccctgtacctgtaaaaaatttaaaagttgcttgcttgccgtttcttgatagtgtcatgttataagcaaaaacgtcttgtttccaatccttgttgtaagtctttcctaggtcttgagtctttaagtttactttttcgtatgttttcatagtgtagcacgtccttttcttttttgttttgttcctttactatatacatagtatagcatagcttttttagcttgtcaacactttttattaacttttttaaattattttttgcaatcaattaaaatcttaatactgttataattctgttttgtattcttgatattgtaccgctttaatagctgtttgataaccttatcaatgcctgcccgttctaaatttttccgtggtattctagcaagttcaaaacgtatcatgtttaactgtacgtctgtaatcattgcccgccctccttactcttttattgtaacaaaaggggttttgattgtcaaccccttttattaagttttttaatctctatcaatataaattttgtcaccaataacgaaaatagtgtatagttcactgtatgccctgatatagtccgcttgtgtcatgttttcagtttcttctatctcgtcaagcatagcatagctatcagtctcatgcaactcggcaagaattgcatctaaaatgtggctgtcatcaattttacgaggtgtaaaaatatcaagtgccccgttgtatgtgcctagtgtaatttcttggataaagccgttttctagcttgtcggcaaagtcttcttttgcactttctaagtcttcccaatcttgtttataatgttcaaagtctacatattttgtaacgttcatcaaagcgatttccttttgttctttgtctgctattagttttgtcatgtttagcacttccttttcttatttatatacctagtataacaaaaggggttttaattgtcaaccccttttattaactttttttataactttttctttcctgtaccgattgcccaaatctcagcaagtaaggcaatataagcccaaataataacccccgaaagccctaatgccctaacgtcccaaatgcctaagttttgcactaagctaaccactagcgccccaaaaaacacacctaacgccaccaataaaagaataaaagatacaaatagaatccaatcaaaaaatttcatatgtttacacgtccttttcttattatgtactaagtataacaaaaggggttttaattgtcaaccccttttattaactttttaaaattatttttaagctactcttaagcactcatcaagtcttattcttacttgtgtaccccatacccgattaataaagtatagtgaaccgtcactatttgagtttagtttactgaagcatacccgcccccgttcaccacatcgcaaacaatagtatacccgttcttcttgttcatcaatctttaaaatttcaatgcttgccgtgtttgtcaatccgtacaccgccaccgccttcatatctctaacttttaaatggtctctcatttcattcatgtttagcacttccttttcttttagtatatacatagtatagcatagccttttcagcttgtcaacactttttattaatttttttaaatagcttcataactgatatagtttgttttcgttgtcttgtgattacatttaagcacatattccgctatcagctccaaagccccaccaaaatttgtatgaatgtatacacgtttaaaccattgtaccgtataaaacaaataaccgcttctaccgtgtaaatgtaaccgattttctgtaaactgttttagtgtgtctttttccttgtctgttagtgtctcagttgctaccttgttacaagcttctaaaataccatcaattaaaatttctttttttgtttgtttcatgtttagcacttccttttcttatttatatacctagtataacaaaaggggttttgtttatcaaccccttttattaagttttttaaattgttttattaaaagtttcccctgaaacttgtttatagcctcgtgcttcataaaaatctctttgttcttttatttctctttcagtgtttaattttaccgtgttgtcaatcttactataagaaactgccgtcccgtttgtcttgcctgttacaaaagtgtttgccgtgtggtctactgctaagaagaaacgccctccgtttaccccgtttgtttttttaatgtataattgtttgttgttcatgtttaacacgtccttttctttttttgttttgttcctttactatatccatagtatagcatgtatttttttagttgtcaactataaatataaatttatttcaccttttttatagtacctttttagttgttcccttttttcctcgtttgtctcaaggtttatagtaactttataagttgttcgtttgtcttgtccactcgatggataagaagcataataaaccatgtaagaaccttttatagtatagtcaagtatgccgtaacgttcggcatattgtattgctttgttttccatgtttagcacttcccttctagcatgtaattatatagagggataacactatctttcatagctagcatattattttctgtttgttccttattatatagatataaactttttataattggttttaataattcactaggtaagttatttctttctttattagttgataatagcaaactttccacattatcgcaaacattttgattataaatatctgataacactttttttaggttttctttaatttcgttcatagtttagcacgtccttttcttttgttgtctataatatatcaaagctatttcttattgtcaacacttttgattaacttttttaaattatttttttctactatataatacaagaaaaagcgtgaaaattgaccccttgacaatatacggcaggtatgctagttttaggggtggcggactcagtgcgtgagctacttggtggattttcactgtcagctacttagcggattttcgtggtgagctacttgagggatttttagtggtcagctacttggtggatttttgtcctgagctacttggtggattttcactgtcagctacttagctaattatgcctagtagttgtaccaccccctgttaacctagtatccaataaaataaaaaagcccttgagggctaatttttatttaaaacttgtaatcgttaactcactagagtctacaacatcaagctctgtgattgttaaactgtcattatgagtgaaccattcagtgaatgagtctgttaggtcttccccacctgcacgccatagataacctgtgcttaagtttactacatgataagttctgtatgaacgttgagatttgccatagtagctatgtgaagactctccatagtcattacgcttactgagtacaagatagtcatacttatctttcttctttgacttgatacgaataatatcccctactttagctctagagaacttaactcgaagatagtcttccaactccatctcagttacttgcaactctgtagtgattgtgattttcatattaattcccccttaaatgttttgtagctatcctatcctaaggtagctatcctatcctaaggtagctatcctatcctaaagttttatcctatcctaaatctatcctaaaggtatcctatcctaagtctatcctaaagttttatcctaagtctatcctaaaggtatcctatcctatcctaagtccataagctaccaagatactgtttcctatcagctaaaaagctcttaatagaacccatgtcttcaggtttaactccatgaactcggtctagaaatatagttccctttcgttgcaatacataaaacaggtacaaaactgcttcactatcaggaaaatccacctgctcatattcatcttcctttagtaaatcataacggaaaagtaggttgtaatctccatctatcgaaggaacttcattttctaagtattctgaccaagatgggtagtcatctccgcctacagaagagcagtagtaagggtgctcagtcagagtaatcgtattatcttcaccagctaatctagcattaaatacttttgctgtctctaggagttccatcttataagctagtaatagttcatattcttcgttaggaataacccccataaaggtatctctgataactacttggctagatgcttcatcccatacaagtcttgcgtactctgccaatgggtgcactggtacggattctctacgttgcacctcataaaaagagtgggtacctatgacttggttaattaaaacatatcctgaacctctagcaataactatatctttgttcataataataccctcctaagcattttcgtcaatgtcgtactctcgtgcaatacgttcttcctcttccttgtcctgcttcaaaattaaagcataagtccctacaaaggtaatgataccgataagtaacccaaagatgatagtagcaattagtgcagttactaatgaccatactaaacgtttttggtcttcctgtttgatatacgcatcaacctcggaacgagttgttttctgcttttccattgtgtttcccccctttataagtcaattagttgcatgttgcttgctgtgttcaacggtacagtaatcttttgtggtggtactgctccgctctctagtagttctgattgataacgataatatgagcaataacctaatatgtctttagttgatacaggctcaatagaataagcatgtataggttccaaactattatagtaatcagttataatactagacaatagttcccaatctaatgttctagggttgagtgccctagtaaactctgcaaagtggtagcctaaatatctaacaccttcgggcaatttgataagcacatgtattcgatatgcttgtatcatattatccctccttaactctcaaatcagggtgtacccatgtaggtgtgtcagctactttaataaatttaccattcttgatagtaacatacccacttgctactgcatctgataatttctggctgaggttgtttgtactgtcagggtcactagctaaagtcgtgccttctgctaacattttacccccaaacactctcacatactccataaagctaccgtgatatgtctgcttagactcttcatcaggctttgtaggtgtgtcaggcaatactgcccaaccacctttcaacccgttatacatacgctgtagtttactattcttcattggcagtaactccttcaaaaccatttgattctaaatgcaacccttcgaatcctgttggtgttcggtagtacattttccataagtctgcacgtttaacttgctcatcatttcggtagtcatcctcttggaaaccattgtcgtccatccagtccatccactcttgttctgcctcgtcatactcttcaagaccaaaagcattagtatatacaatattttcatctaaagtaagctgatagttagctaacgcatcaataactgcaataccttccgcagggttctgtacaggaatgtaatgcacctctcctgaacctaagttgatatagttgtaaacacgatactgtttcataattgttgttcctccttttgtaagctatatatagctctctgttcttcaaacttgtcaaaaaaataacctatgttgtcataaacatctttgctgtcaaaccatacatataaatctctaaatgctaacgactctgcggttcctatttctgtaagctctctgtgactcttgttcgcatacaaagtacacaatcgttcgtattcacctaatgaaactagtttgacaagactaatatctaatgtacgtgatatttttgctaaggtcttaaaggatggtgttctaacattgttttccataccccctatataagattgccctacacccaactcttctgctaacattttttgtgtatacttctttccatttaaacgttttctagctctaatatttttaatagcggagcctataaataagttgttgtggttatccataatcaacctcctttcagtactgtacatctagtataactcatgattagctaaaagtcaacacttaaatttcatagtatttatctactaatgaatacttagcaaccatacgattcattaatacatcttttttcttgccaactactttaacaacttttgccttcacaagttccgtcaatcgaggttgtaccatgttacggtcatttgtgataagcttaccttcatcatacaaggcttgtgcgagctctctagctgtgtagctcttatttgaccctttaagtttctgaacgattgtttgttggcgctctcctaagttagcaataacctctcggtatgaagccaaccgagtttcctttacaatatgggctttatgctcttgttcttcttctgaatttacaaccgtgtagtttaatgagttcacccgatggtcataccaagattccatttcagatttctcaccaaaagtaatagtgtgtttcaatttaatagttcttgagatagtctcattatcgaaatcaaaatacaaagtatagatagggaacggtttaatataagcttctgctagcaagatgatagcatccatgactttttctaagttaacatagttgttttccatatctgttttttctaatgtgtgatatagtttttctaaatcacctcccatgtaaataccgcctaggttatacatgtcgggtgaaggtgtgccttgaacttcttgacaaccttcttggattttagctactaactctcctaaataaccatagtcttcaatgtaacctgtccaaggtaagttcatacccccattgttataaaagtcatagtagattttgtttcctgcaattaacatgttcatgatagggctctctgtgtagccccaatctaccccattcttatccattagttttcgatattctttttgatatttaccttcaccagtccaatatgttttcatcatttttcctccttagtaagtgtttttaatatatgtgagacagaatctctttgtacttgactctctgaatacttaggtactataataggtatttgctttttgtttcggtatcttctatttctaagttttggaaacctcatattagttgtgcttattctaatgtttgtagtcatctttctattcaaacgaataacctccttatagcccgtaagattctgctaagcctgtccagtcaatgtttagccaatcaccaagttcggttgggtttgtactgtcagctacttggttaactatgtcatcaagttccatatacaataagatttcatcatcagtcattccgtcaaagtacttttcatcttcttcggtaccgtaatcttctagccaagatttaaaaagcttcaacttttttctgtcatcaaattgcaactcgtattttacatgttctaaaactgaaccttggtgctcactgcttgttaaaattgcttctaatgtgttcatatttaacatctccttcttgtttataaacctagtatatagtaaggggctgagaaagtcaaccccttttattaacttttttaaattttttctagaccttcatattttctagcatttcaactcgttctttagcttccttcaaccattgctccttaatgctaattgctagctcttttaaaggtttacgctccatacatacgtagtagcaatcattaaaatatgaaggctgtgctttgtacgtagtatgcaactttctgttactactgctaactttaatgagttttaactcacctttttctttattgtgatacaaattatacatagtttaagtcctccatcaatttaataagtgtccccattgtataacctaatggtgcttctgtcaagaaaataatttctctatcagctacttggtaaggatactcctcgatgtcaattattcttttagggtcataataataaaactcttgagggtcatcctccacaacagtgtctaacagggctagcatgtcgtctaagctgtcttgttgcttagctagggtaaatacctcttcattagttaaaatggcaccataagcctctaagataggttctagttgaatagctgttagttgcttccgcatctctaaacgaaagtcgatacctgcttgtttattgaactcaggtatttgtagttgcttcaccgcatcaacccactcagcttgcagtccttttacgatttcagcatacgcatatacattgttctcattgagggtatctctcaagcccgttaattgttttaagtgggagtttaacttctcctgaatagtttccatcatattcttttcgtcctctctctttgttatactcaattccaaccataagttctttcttagcagtataaatgtgtttcttaccttctctcatacaactagcacaacgataccttcctgttgtcctattggcattctctttaccacaaacagggcaaatagctaagtagcctgtagtcaaagtcgcaggaatgatacttttgtatacagaactctcattcgtggctccgctagctcctgtccctgtaataaacaagtctttctcaaatgtgtcatacccatctgaatgtggtagccttaaatgatacaaagcataatgaatagcttcatgtcgtaaagtactctcaattgccttgtaagcaccttcttcatcaggggtacctgttaacaacattgcacctttgagcatcctagagctcatctcaatgtgcggtgggcacgctcttttatagtaggtaacaaaccaagcgtgtgtggtagtcaatctgttattgatagttacatgaatacgtggcatcttaccataagtaacacttaagaactcattaacgtatctctccatctgagtaacccaccacttgtacatatctttaggaaaagaaaagctgttttccttgggaaagtgataatatttaattttacctatttttttagtatcgtaagtagtcataacgtaattcctctctgtctgatagtgctattccaataatctcaacaacttgcatcgcatgagcccattctttcataccttgataattaggtattgattgtaaatagtttgcgtggcaaatcaatccatccattagtagctctaactcaaagtctgttttgtcttttatagtatctacaatatgttggtacttgttcattagtacacctcctatttctttggcttaagttcaaaaacaatttccaagtctaacacgttacaaatggcaactaatttatctttttgtgggaatgttgtgcctttttcaaggaatgacacataagtttgtgtcacccctgcacggctagcaagctctgattgagaaatctttttagcttttcgagcttgtttgattgcctctcccatattaattactaatgtttccattcatttcctccatctcttgctttacagcactgtattttttatcaatcaattttgtttggtctaagttcttaacaataatcttacgttgaggtgtattttctctagaacgtaataggtatgcacggttgtcacttgttgttctgaatcttaatttgaagtccttacttgtattcagtccttggatttgagatttaaactgacctgctgtgctctttagtctacggttggcttcgactacaggaatatctttatgtggaatattcgtaacagcatttgaaccttgattgtatacgttagttacttcctgaatgtccatccctaagctaaacagtaaatccttacctagtcgtcttgcgtgtacagcatcttgtaattgtgcaaacagtcgttgttggtcagctacagttaaattttcacctaattcaatcatgtgtaaagtatctcggtagtaacgctcattatctgatagaaacttagccgtgttaactacttgtgttttttgtacatcaacttctacaataatcttattaacaatgtcttgcaattgtgtgttaagtttttcaattctcttttgtgttctttctgccttgttaaccattttttgagtctctttagtaattttagtcatgtgattcttcctccaataataagtttatttatttgatttatttaatattaccatgtatctttttacttgtcaacacttattttcgatttggtcgaaaatcttgtaatacgtgtactacatagccacggtcaaccaacatccgacatactaagtctactttccaatccaatccttctgcttctagctctttacaaatatcaattaacatctctgtttgttcttcttgtgttaaaaactctcctgtgttactattgtacatacgagttagcaatccaagctctttagatgagtcaatagcttccagtgcccacattgtttcaattttatctgctgtgtgttcaatgaatggtcgttcaactccacattttgcacaatacatatgtttgatatgtcctacttcacgtcctcgcatagatggtcgaaagattggtgctacatcccgacatgcaccacatactaagtttgatttacctttacctgctcgttttttcataattaattccctccgttatcttcttgatatatttataataccatgtagctatctacttgtcaacactttttattaacttttttaaattgttttttagtggtgagctacttgatatatttataataccaccccacctactatatgtcaacagtaaaacaaaaaaagtagctaattaatctagctacttcgaatattccttatatttcattttgaaccagtctattacactgattatcattgctattactcctagtgcaaaaaacaaacctatgcctacgagaatagttgtaccaacccaagagatagttactgcccaatagtaaataaaactcataactattatagcacctatataaaggacagcatagagtaaaaactccccaactacctttaaagtctcttttagtagataccaaccaaccccttttttatttgttcgggtattcttcattcgacagcatcctttccagtctgaaattgacttctcgttcaacctgacggtctacatttatcgtgtaacccaacacgaatccaattatcatacctccaatgactagcaacgtcactagaggtatactctttttacttatcttcatctacttaattgtattcagtgtacgagaaggcatacgtcttggaacattgtaagtatctaggatatagaacaatccgttcttagtaatgttaaacgctagataaatgtctttaagagtcatcttcttgtctgtgtatgccttaatcaactggttacgcttgttgtcgtctgataggtactcggctacttgaactcctgcaagccctgtagagccccctgtagttctgtaaggcactttatgcttgttaaggatagaatataatcgacctgcactgaaatcatatttttctagaatatcatgagtagacatcccattcttataatcttcaataactttctgttcagtgaactctagaatcgactgctcttttgtttccacctcatccgcagactcttcatcctctacaataatttcatcgtcaataacaagggaggtaaaatcgttacctgtgcgcttacctgtagtgtgtacaattactccgactgcatcactatcaactgttacagaaccgtttgctaagctctcttgtggtttcgttggtttaccttttttagagatattctcaacaaaatctttgaaggtcgtttgttctgtttcggtaaaacctaagttatccattttagcagatagctcttcaagagactcaattagtgtatctagcttttcaaccacgataccaaaacctgagtctactaatacttctaaagtttctttgtcaacagcgctacctacacctacagtttcgacaacataaccgctagaagctaacgccttaggtttattcatgtcattacctgcaaggtcagtaactgcaaagaacccttcttccatctcaaacatacgagattcttccaactcatacccataagcctcaatcccacgaattaaatgagggtatttactgaagtcctcagaaggaatttcacgcttcactttatgacctgcaatggactcaacagccatactagcttttttctcttcatagcccgtatcaccatactgtttgttccaagcttcctgtgactttttaatattctcttctgtaggaatatccttaagctcaggggttttatctaagacagagtttgccatatctacaaaggaactaacctctgctcgtttcacctcacccttatcctctacaactttctttacgttatcagtctcttcaatcattgtggtacctccttaaatttatactctaagtataacaaaaaggtctgaacttgtcaagacctttttctctttttattataatttcgttaagttcttttcttcgatgttgtattcaactcgactgaggttatagtaaaacttacgtgtacctagtacctcatcctcatctacaaaaatagatttaacaatcgcagtgtctacttctgcattgcctgcaccatcatcatagaagtatcgtactgtgtctccaactttgaacttagggttgtacagcctatagtcatccgtaaactctaatacatcccgtgtaacaaagaaattaaatggaatatcatatacaacccaataaggtttaaagtattcactcttttcatctcgacctacatcgtaagatatttgtgttacgggtactgctcgggggtctaaacgtactaaaatatcccctttattcgtggactctaccccacgaacaactagtgtactccccgccatcagtttgtctaatgtttcctgtaatgaaagctttttatagcttagttgtttccataccatctgctatcctcctagcttagtagtgttttttagagcttcgtttaatctacggtcttcttctgtaaggtctagattgttgtaaaactcctcttctacttggtcaatgtattcaattacttcctcatgtttgtcttcaggaatatatttaaacaggacttcagttaatgaattttgcaaggctaagtttcttaggtttaactctctaagacctgctacactcattccttgtaggctgtcacctgtaatctttttcttaagttcaatagccttcatagctatttgagggtctactacggacacgtactgcataccattaaaccctttttgaataatatcgtctagtagttcgatgtcactatataatgtatcttgggctgacatttctttttcatgtttatcatgtctcgtctctacagggtttttaacctctttgcctgagatactaactaccttagacttgacacgaccatccaatacctcttctaatggtattccttttttgatagcttcttcacgcttgtctttgtatcttgataaggttgctttacttatctcaaactcatattcagcacatagttccataatctcgtcatatgtcttgttagtgtctaaagcttcattaaccttagatgacagcaacttattattatggagttgtaacaaaacagaacctttactagcctgtttttttcttgttggtttctttttatcagtcatttcagatgtcaaactccttttgctctattagtatatgaaatcaaggtaaaagcctaagcaattaccatttcacttataatatagcacgagttttcacattatttcatgttgccttaaaatcctagaaaagtcctactacttagtataacttttctagggtgtattaaggtgtgtaacatgaaacatttgtaggtcattattaataagatgaaataatttgtttcaactaccccataaaaccttactaagttgtgaccttttttgcatctaaaactagactttttttcctaaagaacggataattttagtaatatcatgtgtatccttctgtcctgcatctaatggaggaaacccaaaaggaaaaggtaagtccaatggtgatggagtccagtcagtagctttctcaacttctttagacccatctgtagggtacataattgaaggtgcagagtgtcctgaaatttgagcactgtaggggttagtatcatacaccgataaatctaaaatatagttggaaaacgcagtgagtgtaacatctgtgatgtcaaccaagctgatttcagggtatttttgagctaaggtcttaacatagttccctaagctagacaagtgagttactagttggtctactaccttaaaatcagcgatagtgttactactgttatacgagaccaattctagagggtcaactgttttaatacttgattttaacaaactaaactttttattaacatctccatacaatttacctagaggattgacctttttaggtaccccactcttagtattgatacctgcatgtttgtataagtctttgtaagaatcaaagtacttaattcggaaccctttaccatctcgagcttgactctcatgtaagtccgattcaggagagaaatacggtgtcatgtcatccaagctcgggaaaaactctacattacccttccgtaactttttacgagtatctttagtttctacaggaaatgccataccatagtcagttgtgataactaagttacctgatttccctcgatatactaagtaacgaccacgttctctaaagaaaccattaaagactttggggtttactgctgttctttgcactacaattgctctaatcattttgttttgctcccttcctcaatactaataaagtgttttaatgttgctaagttgtctacatatacctcagtgcctctagttgccatactaacattcttcaaagctgtgtctacagaatcgtagtaatgtagtaagtacacgttgccttcaatactgtctcgcatgtcctgcatatctttgttgtattttactttagcgctgttgatgatgtcagtttctgacatagactctactgctaccaaaccctttttaaggggctcctcctgagatttactcacctcagtatactttttagctacatgtttgtctaaacggtctttagacacctgagcaactgtagagcataataaccaaaaagcaattaaaattagcactgcttgaaaattcgtaatcatttattttcctcctttaatctttcttcctctagtttaacatagaactcatctattgtcaataccccttttttaaaattacaatctttgcaggcacaacctaggttactaatatggtcagtgcctcctctagctacaggtattagatggtcacagctacagtcacctgagcttacaggcaaccgcataccgtgcctattcgtagatgctacatctttaccacaatagatacaggtgaaattatctcttaatgcaactcggtgtgggagtgcaggcaatgtacgcctttctgttacacgccatgaatagtcgtcagcacattctttagaacaaaaattctgtttattaccttctaaaggttttccacaccacttacatacagatttatctgtcctaaaatcagaagagtatcggggtacaggaaccccgaacgcattatagtactctagcaagcttaaccattttctagtatactcatcctcttctgcattgtatcgtagctgactaccaatatttgtagtcttagccataatttctcctctcgttatctaccccaaacattgttactaagccctaccttttcagcaaaggcatcaataaactgtttgtggttttcatctacagcttgattaaaccgttgttctgcttgaacaatagccccattcctaatctcaatgttaatcaatgctttattaggtttggcaatatctcgcataaagatgacttgtttagctcctgaaaccactgaatgcgcatagctagccacacagttacccatgtcggaaccttctgacaggaagtcatcaactgttcgaggtacaatgattttgtattttgcccctctaatcttaacactttcgtagtcagatattttagctgtttgactctctaacttagctacaaaatctgagtctttagttaggtttacattagctacagcaatatcatgggcggtcttaagataacgtgggtatttgtcataggttgttgagtatctagaaatcatgtcaagataatcacggtacgtagtattccccgtatcggagaacgcatgagacgaataacttctaatacctctaaggtcaaatccttggtcaagggggcattgatagtaaatataaccaacaactctcttaaggtcaaatccccgttttaaatggattgcaatagcagaagtatcttccttcttccatattagccaaccaccctcaccattcacaactcgggctgtgtggtttactccgtactctttgtttagagatttagtaatatccataacctgcataaacaacttgtaaccatcgtcatagtctttaatgttttttaaagccatttttttagctttatcacttttatcctgtacctctttgtcatatagtctttggtagtagtctttcaccttaggactcatagccttaatgttatctgtcataatacggctgttttcttctcggtattcacgtgtcatagaatagtaatcagaactatttgttctccactctaaccgtctacgaacttctctatctatgtcttcccaatcaaaagcttttacctcagggagtcggctttccaaccaatagtcaaagctatccatgtagaaatactctgaaaactccccacgtttcacattctctacatactctttatagttcttagcttctctagaaaaactttgtagctgttttgcatcaagctccccacgtagtgccattttccataatggtttaggtaaccccatcatcatacgtgcactagtttgggtcgtgtctaaatagtttttttcgttataactaaagtctgacatgtaggctttgactgtagctctaggtaaccccgacttataaagaacttcaatccaagaatactgaagtagccgttccaagaatctaccaatgtaggaagccacttctttattcatggtagccattgtcgtatacatgtcatgataaaacattggtgttgctctaggtgataaaacaaataagatatttttaatcttaagtgcataagaaacttcagcaaacgcttcttgaatatttttatagctacgttttagttctttgaagttcttagtatatttgaatactcggttaacaatactatactcaatatatgagatagtgtagtcagttactcctacgtgaggaactacaatgtaaattttaaatcctgtattatctttttcatcaatatagaaagctccccaagtatcgtcccaattatcaggcttttcagtcaagttcttcatactgaaagtagcccctgcattaatggtgttgcctttcctacttgttacaatctcgtcttcttcgtagtatcgaccaaagtaatgatactgcaaatcgttcacttcgtcacctacacgtttgcaggggaagtatagtcgtggaatgtctgactcctctaattgtttaacagctaaattaacagtgtctttcagtgttgcctctgcatgtcctgtaaaatcaaaattcatagtccatttctcctttgtttttaagttctaattaactatagcacaaataaaaaaagatgtcaacaagaagttcacatctttttacaagtttatcctagagataatctaagtaccccgtcagatacatagatagacaacaaatattttccttgagacactttcttaactgtggaatacttaatatcttttttatttaagataatggttcctgtgtctgcaattacatggtaagagttttctgattctgctatctgcatattagcatttaacgggtataccaccgcagttactgagttgtattgaggtttgaacattgcactacctaaaagtaaacctgttaggttcggttccatgataatgtctaacattttctttgtatcccttttatctaacttaggttttggagccccatctttatttaatactaataaagtactaaataagttttcgttgtcataaacctttggcttaaacaaaagtgttagatgttgctttatatcccctgtagtggcttctagagacgattcaactacgaattggtataatacctctcctgcaagtttagtctccatgaaggacacgtcagccctctctaaatgcaattccatgttatagtcttggatgttagaaaacatagagttccccataagcaaatctacgtctaatggagttgaaaatacaggttccataactttaacatcatcaataaaggcacccccaccaattaatgtgaagctttcttccagtgtctttaacataggtacttgactaggtaatggcttcaatgttattgtagctgtcatcccgtccccttgaaaaattacattatttaatgctgtgtgacataggacttcctcttctaaaatatctgtagaataggctaaccctactaaagatagctcattgtttctgaatgattgttcccctccactagaagctttaattgctttagctaagtaattcagtgagctttgtttatgtttcattgttaacatacttacactcccctataaagttcttttctgtgttgttttcctgttacggttacccttacgtttgttagctctagctttagcaagactgctagagttggctctcttagtccccccacccgtattccttgagcgtagaaacttcttctgataaataaagataagttcgttcaaattaccatatctccgaacactaattgaaattttaccgataattgccttgcctcgatgtacataatatacagtatctaggctagtctcagttaaattttctttcttttcagtcaacctgataaaatcttggtgactacctatatgcttggatacgagttctaaagcatattgttcttttagtgctatgtctttttctgatactcctcggtactttttgttgaactctacatagtaatatcctttaggggagtttacctgagactgataagcttgactaccgtcacccatcccaagtaaatttcccataaggttacttatatcaccgtatttacgtccgctactagccatttaccttaaccattccatagtgctctgcatcagctaaactaacaaacgcttcaaaagtacctgattttgtatgcaaacacttgcctcttttagggtcatttacaataatgaatactgcctcagtaatagagggaagcgttattgtatccccaatctcaacttcagaacctgtaagtacatttctcatctcattcattatattttccccctattataaattttcggtaataataaacccgtctatattctctagctctaaaacccaacctgcaccgtcaaccttatttttactgtattcatccaacttaatcggttgtattgttaacttttccttaccataaccttgttgagacaaccactctaaatgaatgtctaaatcatgagccttaatacatctaccctctttattagagtacgtatgtctatctgttcctgtaggaactagttgtgctatatatgccattatatatccccctttggattgaaatgttctattttaattgacttctcaggatgatttctattattaatcatcacatcgcaaaataccttgttagcttcctcttgacctaaccttgatattaaagcattaataagtacaggtttacgtgcattctgactgactaacggttgattgactactccacttaaaccaccacttcggttactataactagccccttgaagttcagggtgtgcttcctctattctaggggtaatatgtttaaatgtccctaacattgtagataaatccttacgccacaatatattaagtgtgtggtacacgtccttaacaggagacttagttgcctctttataaatacctacccaaggtgttaaccctatttgtatgtaggcaataatacctacatgactatagttcttggcttttagtattttttctactttaccaacatgagaatcatgacacataacgtatacatagtcacaaactttactatagtctgataactgtttatttagtcgttgtgtgctatctcgttctgtcttaatctcaatgcctataacacccttgttctgtgtgcatatcatacaatccataatagttttttgttgcataatagccttctcaaagattagagcactgtccccaatatccccaaacatgtgctccatttctttgatgagagccactatatcggcttctctaaacttatcttcggtcataggttaaaccacacatccttaattgctactacatctgcaattaagtctcgtgtaggcactcttgtgtctaaccactctattgagtctaatgacacaaacacatttgttggtttcccttctgtcacagaaccgcttgcagtaaacttatcaggctctctttctaagaaacctaagcaaggttctcctgtaaatgtatccacaccttctatgataggtgttacaaagagtggcggtttttcctcaatgtagctacgctcttgttttattcccctagtttgagctaaggagcctagtgtagtagactgtctgtaagggactacggctttcttagattcaaacgcctttacaggagggtctgatttagcctgtactgaatacacgatagcaacatcaaaactgttggggtctattacgtgctcaataaggtagatagctttcttatttgttataacttctcccgtaattgggtttgctaccccgtctaaaacaggcacatctttgtataatacacccgtcttaatctttgtaggtaaacttagtattggctccgagaacgaagcttgtaaatccatatccataaattatcactcctatacataaatatagcatagttactctttgttaagcacttgctctctaagatagttagctacttcctgctcttgtttgtctttaatttcttttttatacttacgaaccataataattttaacaacccaagcaacagttacactgacgaatcggcttaccataaccgctactgcgtaaatgatagctacgataatgctcagccataccatatttgtaggtagcaacgcaacgataggggatagcaatagcgccattaaccatactaccaaaggagcaatcagaacttcaatacctaaaaacacccatacacttgtaggtaaaggagaacccccttctctaaccataacacgctctttctttaaagaagcatagatagctcgaactgcttgagccaccataaacactaccattacaacaataacttctgtacccatctatttatcatcctctctttcaataatcacgaatggaaaactagcaaatgctgtacttggtgtaggtgttccatgtcctaccactgtccactctttttcttgatatgttaatttagacccaataggaaacttgtgttttagttcactaggagccaatacatattcaaccgtttttcttgtaatcatttctcaaccctcccgattatagtagggtagccgatgatgccaatttcttctacattagtgtatgcaaacacttcctgcaatggtttttgaatccactctcctcgacatttaatcatagtcataatgtcacgacctaaagttgtatagttatctattgtcaggttttgaactggtaaatttgtactagtcataaggtactctgctacaagaagcattgacctaataacaatgttgtctacatctttactaaccttcacgtctacataaacagtcattggtgcgtgcaaatcaacacgaacagttaccaagtcatactcgtccatctcctctgctaactttttatctaaattaggtaaggcatccatacagctaatacaaataggcatatcattgtagccatcgtaagactgtgccattgttacatttagttctctaccacaatggctacactcataagaatcgttcatggagtaatcagggttaaaaaacttaactgtgatagctaagtccttcatattttctgaaataatatacttattcacgaacacttgtaaagctagctgactctcttttggtaagttgtaatagctgatatattcatagtagggttgctccccaatacctagcctacaaatagttccgtcatctgaattgaggacatagataactcctccactcataaatacttcttttactggtactattttaccaatagattgtgtgaatgctcgcaaagatgctttatctttaatttgctttttcattcagtgtctcctttctaaaataaaaacctctaatatactaatagtatagcacactagaggttagttgtcaacacccttataagataatcgggttaaacattggtcggtctttcagtttatctaatactaagataaattgtgacggtgatgttgtaggtaagttattttcagagctatagttgtttgctcccatcggagaacctacgtagatatggaatctagagtagtcttcctgaatgattcgagtagtgtggatatgacccataattaagtagtcaatatcatctctacgaatgtgcttacgaatcttaacgtcctctcgtttagcttccatgtccccatgaactactttaattgtctttcctgcaacctcatcaacaaagctgtacacatcttctcggttatcaatcaaagtgatattgctaggtaatgttcccaagtctttaaagaagaatagcatatctaacgttaagtaagctacgttatcattaaacactttatcatttttatttccttggaacctgtcatggttacccccaacaatcccaaaggttacctgctctacttcactagcaagatacactaatacatcgtagattaatcgaatacccttagcaatttgctctgtagcagggaactcagcttcaaaagcttggtttacattgcgcatgttaatatgttcaatcaagtctccaataaaatacgcatggatatgattgatgccttgctcatgagctgtattaaccgcctccacagctagctcagagactctgttagttaacttgttaaagtcataccctcctgtatcaggattcgttacaagagctcctacgtgccaatctgatagacctaacacaagttctttctctgaatgttctcctatctgcttagggataacatattgtggcttagcaatgtcatttttggtgaactcatctgctaaataggacttcaacccactaaacaaccgttcaacatgtgcacctgttctttgtacttcccgaaactcacgattgttagctaaaacttcctcgttagctaaaatgtaaggagctactgtttgttggattcctttttcttcaataggtttaacaggttcgtcctcgtcaaaagaagtatactgctctaagtcttctacatcaacttgcccctcaattgcaagactgtgccactctttaagtgcagggtctttatggatatgctcaagcaaagctacaatactgtctttacttcgtttgtctaaacccaatgtggtagctatcttattgaatgtacctacctgaattttgttgtagtttctaaggatgtatcctgtaatgatactttccataacgctaatatcttgtagctcgtcacgttcatatttatagtttttgtctgtcaaatttgtacactcctaatgtttataatatttgtctcaatatcattataccacattttagtggttatggtaatgttgataacatgtttattactacttccgcagtatgactacttgcattacctagaaatactgtacctacattatcttttccgtttccgttgtttagatacttagcaatctcccctgcatgagcccctttagttcgcactctaaacatgtcatctcccctagttttatctcctacaaggataactattttctgcatacctgctttcccatactgattgattaaccagtgagctatctcgttagggtactcttcagcgtaaaggattgccactagatagtttcctgctaatttaacctccgccaatcgaagtctccgctccatatagttatttcttttaacatctagcgctttaagctctgttcggtaagtttcttgtaagtctgctatgctcttagaaccgataacactatacgtatactctccgtaaaagttaagaaagtcgttaaatgtgatagggtctataagtcgttttatagaaaaatcatacctatggtaatcatcccccaaatcaacataagtagctattcgttctgcctccttaaggtctaaaggcacaactttactgataaagtcatctgattgcccttgggttataaaatctaacattaccgctacaggacttcgaacttcatctacaatagagttcacatattgaaaattcatgctgtcaccaaagctacatatgtgcaagactaaagtaaaagggttagccacattctctaaagctttcttagtcatcacttcttgattgggcttatatggaaagcctaaaatgattactacctctgcttcagggtcatagttaaaatcttgacctgataacgtatatgagttatcaatcactgtgtgaacctctttgtctgagaacaacgcctgtaggacgtaggaagctaggtatccttgactattgcctcgtgtaataagttgaatcatacagtacctcctattttcagtattttaatactactaaagtataccacctattcaactctttgtcaataaaaaaaagacaactatttaagttgtctttcctaagtacctagccttcagttactgtgattgctacagttgtattgtctgttaatgtagctgtcccacctgtgactttaccttcagttgttgtaagtgcgatagatttaacagaagcacctttagctcctgcatcacctttgtctcccttagcccctgcggtacctgcatcacctttagctcctgcggtaccagtagcaccagtatcacccttatctcccttgtcaccttttaaacctgtagcaccagtgtcacctttatcccctttgtctcccttagcgccatcggcacctctaaagtcaatcaaagctttaaagtcgtcaccattaggtttttgacctgtagagaacttgtcatataattcgtcttgtattgccatccgttatcactccttatgttattgtatagtatactcccctatagagaagtctccgatacccccgacatctacgggggagtcatcagggtgttactacagttggttcagttactacaaagatattataaacaccaaaacggaatctatctttgataaacgccaagaatgcttgtaacacttgcttttcaagaacctctgctgaagtaacttcctctttcttcaagattgggaaggtataactatctctgttagtccctactacataaaatacgaagttatcttctgttatgataataggtgcatcaattttctcaaaggcatctttctctttattatagttagacggtgtaactttatagtcatctccatctttttcaactaaataccagtagttaccttgatgtgtttcagtaaacccatctctctcagtagttgcacataagtatgttccatccaactcgatagggtctgcgccttcaataaggtcaataaattttttaactgttgccatgttgctcaatcctcactttcttatcctttgttttgttttttactttctttaaactcttgtcttgttccgactttagctacacctttttcttcttttgttacaccatagtgcgtaacagggttatttttataccaactccaaatacttgtacctatagttagaatcaatgtaatacccatattaacttgctcgtctgtaaatggaaaaggttcccatccaaactgactcgttagaagtaaacttacccaagaaataaccattgcgactaaacgtacaacagccattgttttagggtctgttcctgtattgttcatattgacttgttacctcctatcctttttctaattctaatatagcactcaaaacaaaaaaagctaggctatccaagataacctaacttatgagctactagctcttttatatcagcaattgtttcctgaacttgctttttagacaccccgtatttagccgtgttatccgctacaagctgttttacagtccactcacctgttaccattaccgatagtatatcttcctccatagggctcatagttatgccctcagttaaactatccactagctcttggaacccaacagttgtgtaaggagaaacactgtcgtctaacatgttttcaacttcaccctctgttgcacctaaaggctctctttttttagtcctaagtgttcctgagttgaaagtacccttgactctagctgttaactttgttttaatatagtatgggaaatcaacttccccattaatttcatattctttacatagtttaacaaactcttcatcaatgtagcttcgcaactcacttctagtagtactatcactgtacattgtactgtattggctatatatcttgttccttaggttttcatacctaacaaacaaggtatccacatcacgaggaaacacacctgttgagctacccacttctgtaacaaatctgtttcctgttctgattaattcttgctctttatctatatttctagacaaaaggattgtcccctttaaagaacaatttagttttagctttcgttctgtctacttcgtgggtagagacataaacttctgcatagctgattgtgtgcggtatacgaataatttcgttatagtagcgttgctccttgtaccctttacaccatctatcccctacgtaatcaatgactagtctgacagagttcatattgttaatttcggagctctcaataataacctctgtatttgtatccattgcgttttggaacatttgacgaatttccccaaatgaggtaggtgctttgcgagaattagtagcagattctcgtctgctactgtaataattcatcgcatccactacttggcttaatggttgttttctactcatgttttcctccttatgtcattgttattcagcgtttactacaggttgtacctctgagtttttcttgttctcataacgagcacgtaaacctgtaaaatcagggtttaactcaatgttgatagcttcattatctaacggtgcataccaattagggaaagttatcatgtacatacgctgaacaagctcagaacgtacagcttgaccttcaggagattctaagaacgcaatccagtcgtttttatacatagatagttgctcaccattttcagttacatattggtagtaagctccactacgtgtcatcaatccatacttagacggtttactagctagctcaaaatagttttcagctaaattaattccgtggtcagtattcaagataaatgtttcttttctgttaggggtagatactttagactttttaatcttaatacctgcctcaaagctactgttaacattctcagtcttaccaaaagcgttaacatgaggctctgcaatagcggaacctttagtaatctctaatcgcaaagtagcccaatgtttaaaagcattacctcctgcactttcgatagaaggagtataaccaccaataacatcccgagcttgattaatcgctaagaacaaagttgatgaatttgtaatctcttgaccaactaaagttgtaaatttagtaattgccttagattgtaagcccatctgtttctcctccataccaccttctagttgtgctctaggtggtgtagaagctaccgagtcccaaataatgattaatcgtctacctgacttagcagaagcttgaattacttcaataactttactaccgacatcctctaccgtaaacttcccatcagttggtttcggttttgttcctgctttaggttcatcaggtctaatgtgatacaagtttttaacagggtctactccacactcaattaatcgttgtgcttcagtagtaccttctacgtcaacccatacaacatctacgttcattcgttgtgccatacctgacattaggattgcgatagtagatttaccacttgagtttttaccgtacatctccgccatacgcccaaaaggtagtccaccacctaagataaagtcaatattaggtagccctgttgggataatatctaaaatcttagcttctcttgtatcagagaatttagttagccctaagttttctgttgataagtctacagttgctcctgtagcattcttttcactttgtttttgtcttgccattctgaatatctctcctaataaaagtattcagtcccctatttcagtttactagtaaacgtaaattacaggggactgttgtcccctgttttacttacccttggcttccttgcatagagcttagtaaggaattaatatcagggattgcacttggttgtggtggtacattttctgcactttgctctacttgttgagcaggctgttgtgcaggtgtttgattctgtactggttgttgcatattttgttgctcattggcaggagccacatctgctaccgcttgttgaggtgtatattgttgctgagcgggttgttgttgttggaatccttgttgaacaggctgttgttgagcaggagcttgttgttggaatccttgttgtgcaggtgcttgctgttggaatccttgctgagctacttgctgttgagcaggctgttgttgaaatccttgttgagcaggttgttgctgaaagctttgttgttgggcaggttgaccaaagtttggttgttgttggaacccttgttgagcaggttgttggaaaccttgctgttgtgtaggttgaccaaagtttggttgctgtccaaagtttggttgttgcccaaagctaggttgttgcccgaagtttggttgttgcccgaaagcattctgtgcttgtggtgcttgtggtgctcctccaccactacgagcattgaaccatccaatgaagttagttacgaagtctgcactatgttgctctgttggttgagcctgtagtgctaggtcttcgcataatgcttgccatccttgaggtaaagcccctagttgaactgactgcataacgttcacatcataagacattttaccactgttcttagcaggcttaacaatctgcaaagcgtaagcgttactttctgaaatgaagctatattgagcaacttcaggaggaacttcttgtccttgaggtggtgcaaatgcagggtcttgtagcttagctccaatttctgcaaaggcagactgaggtaactctactacgtgaacaactaactcttttgttacagggtcagtctcatattggaaagagcctgtttgagggtctagttgtacttgaactgcattaactaagaaacgagcagaaggtttttgttgtgcaccatttttactgaatgggtttggcaacaaacctctagctgaccagtcattgatagcattctctaaaggagagttaatgtcgggtgctaaagacatttgcattgaagcaggaacctctttacctgcatccgtaaatgtttttaagaaaatactacggaaaccttcagcaaactgtttgtcaggcgctacaggtggtaagatgcggagcatcaatgttgtagtatttttgtcaaaatacaatttagggtgcttcaattgtttatcagggcgattactgttgtcaaagtcccctgtttttactgagcctagttgttgttgtaattgttgttggaagttcatattgtttaatctctcctattctaatagttgttaggtgcactgtttgtaaagttcataccacgttcatagtcttttactctacgtaactcagcaccatactgaattaacatgtcttttctttgttcaaatgctttaaccacatacgttagttgcccaacaaggtaggtataagtatttacaccttctaacagtttaacataagactcgtcttgtagaatctgtgcgcttacctgttcttttgtaggcttgttaactcctgtgtccactaaagctaaccttgcctgttcataaatacttgctctgtatgtttctgcttttaattccgcagactctttgtacatcttcactttttccaagatagatgcccaataaacatacttagatgattgctctgagaactcttttactacgttaaactcattaaccctaagctcctcagttaaatcgtatgtgtgactgtctccattaccatctttaatagtaatcttatcgaagtcaaacattcctacattaatctccaaaactactcaccgtcctctcgaacatcagcaattttagtgataatcaaaaccttacctgtagtgccttttacgacctgtacagcaaaattctcaacactgtatttgtcttcaagctccttaaagatggattttacttcatcctcggtaggttctctctgcatgaccatctcaattaaaggcttgtcgataaatgttactccaccaacatcactgccatcaatcaaatcagtcgcataagaaataaatttttctttgtctcccatgtcgcccctccttatcttagtacttactaagtatatcacatattctagtgtttgtctaccctaaattacatttttcttgtatctctttttaatttaataatgtaacttggaattttttgctgagtttctgtaggaataagcgctgtatcgtaacctgcattcttatatctctcaacggtagacgtaataattagctccttgtcataggatgggtacactgagttgtttggtaatgctaatgatagtaagttatcacctactgtgaccgaaggctcctcactcttagacctagaagcaattaggctatcaatatatgataccatagagttaattgcttcaggaatttgtgtttctagttccttgacaatactatctctattctcaatagctttactgttagacaaaggttgcttttcaaaaggcttctcaggctctacaggtgtctcaggttctgtgggctctacttcctcagggtcttttacctcgtcatcaatagtcaattcttctttttcgtccattatatcacctatacaatagatagatagctaggtctgttagcttctactactgcttttcctttctccatatcttcttttgaaatcagaccattatcttgataatcagcaaaggtttttttgtctttatgatacttaacataccctttaactgatttgaactctgctaactcttcagggttataatcaaccatgtcgttatagttttccccaatctctacatctgattctattgggtaccgtttcattgtaccatcaatccaatcaactgtcaagaagtctacaggtaaattttccataatcattttagcagttttagctacaatatcaatctcctcaggtggagagtcgattacaatactatcgtgtacagtaagaactacttttgacttcatccctgcttgtgttaaccactcatcaataaagactactgataagttggttaaaaatgcccctgtaccttgaataattgtgtttactgactgacgtagtgcctcatttcgaatacgtttatctttagagtaagctcccatgaggttacgtctaaagccttgcattgtttcaacgtatccgtgcttaagaacaaacgcatgtgcccattggataaattgttcaatcataggcttacttgatagaaacttctcaaatatctgctcagcttcttctacagtaatatcattcttaggtgcgaaagatgaaggggtttccccgtataccaaaccaaaggcaacacctttagctcgtttacgcatatcccctgatacctcactctcaggtacattaaaggcaattgatgctgtatttgtatgcaagtctttaccatctaagaacgcttgggtcatagtcgtgtcttgagctcttaaagctacaacacgcatctctagtgcttggtagtctagttgcagtagagcaccattcttaaaactagtcgtgaacattcgtttaatcgggtaagagtagtcaaaccgtctagggtcacccactttagaaggtagttgttgctgattggggttcgaacttgatagccgactggtttctgttcctgttgggttgaaagacccgtgtactcgaccatctttattagaaacatgttctaataatttagtggtgaagttattctttaaagtgttaaccttagaaaactctagcaacagtttagcaagggctctatgttcttcgtagtactcaatgataagtcctaagttgtgtttattagacttatagtggttccacttaagctcttgttcaggaatacccgcatcccatgcagtatctacaatagattccttatcataaggaagctttatacctaacatgtcatacaaaactttcttcttatcatctgaagatgtaggtctgaacttagttccatttttcttaaaacgggtacgcatgttaacaagcgttttgtctcgttcttgtggtggtgtattaacaaaatgttcaatactcatttcatacaactcttgattacgttgttcaaactcttgtatgataggtattttacgaatctcttctgttaatctttcagtttccttggtatactcacggtcaatgttacccatgtagtccaagtttgctaaaacacctacactctcgatatgagctaaagctcgtgataacctagggtaaaagtctgtgaataatgaccacatacggtcactttctttcagtttaggctctaaagtataataaatacgtctacagcagtccacgtcacctgaggcatacgggtgtagcatttcaagaggtatccattcatagttgaagtctccaccatcaatttcatttactaaaggtttaactgcttgctttttaggttttgggggttttttctgcttagggataagagataacttacgaccctctttaatatattggtctctaagctctttctctttctcatcaatttcagcaatctcaagttcccactccttaatagcttgttcgtgctcagcaactacacgtagcttttcagcttctaagtgcttttctgcatattgctttttgtaagcttctaatgggttatcataaccacccatatctgtcatctcataagccaaatcagatagtcgtaaggacactttagaatcttgactgattgctaaatagtaaccaatcttagtatctctgttctgagtgaaatctgtgaatccttgtgtactcattaagaatcgaatatcgtactgaatgttatgccctactttaataatgtctttattctcttggaagtccttaatcatagcatagatttcagctagttcttcaggtttccatgagaactccttatgttcgagagggatagttaccccttgggagtcatcccaacttagagagattactaaaggcttagctcctttaagctcaggtttcaatgtatttgtttccaaatcccatgcgactagccagtaagggatggttaaccctactctcatagttttaaactgattgaatatctcccgtactctttcgatagtcgaaacaaactcgtattcggtatcttttgccacatacgcctcagaaccacttttaagaaacttctgtaatacattcatatctgattggacaaatctttcagtgttaggttgtgctgtaatgtattccattgagtaaataggtagtacccatgtcgggtactcagcaataacattattggcatcgtcctttagcttcaaagtaacctcttcaggtcgccctcgaagcttagtaatagcctgcacacctaatgtgtatttacaccctaagtttcccattgggataataatgtcgggttttaactccataattcgttgagttaatctacgctcaggttcttttcttaaagtttggttaggttctttatacttaataacccgtccagttctagggtctgttttcataacctcaggtattaaatcatacgtgtagtctacataaatgtcttcttgtttaagtttaatacttcgagcatactttaataatttcttacctaaattagtagacaagaaatctgctcgcataccttgctcatctgacactacatgcgtatctctaacgtactcttgtaggaataatactttcacatggctcctccttatagtatataggtatttagacaagtaaatgtggctatagtctaaccctatttctcatgagttaactataccacattcactggtgcttgtcaagctttttcatttaatttttctaaagcatcctttagttcaactaaagggacaaacttaatatcttgcttctcgggtacaataaatctttttttatttataccatcccaagccttcttctcttttcttgttgttatatctagtctatacatcttgtggtcttttattgaataccctttagcaattaattctgcaacggctaagtctttagactctagtatctcttttaccacttcttttgtataacctgtatgttctgatatgatacctgctaattctgctctattaatagttttttgtttagccatcataactcaccctgtctttcactctgttagggtttcgtttgtctaaatctctttgtaccattttgtctagtgtttggtagtcgtctttggaatcacatacaatataaatattcattttccaaatacttaacgaagtctgtatgtgtttaaaatacttgtatttaatcttgggttttacttcataaaaatccccaactttatgataatattttttatgtctctcagctatttcattaggtctcagtctaggaaaagataactgaaccttatctacatggttcttcaatgggtgtagcataaacaaaatatcataagggctaatgtcaggtatgacaactggtacatcaactataactgaagttgctgaagatgtcaaggctacattgtctatttcatcataagtaaaatcctctctagagctaaagacagcttcacttgttacattgtttgctaaccctttaatcacataatagggtactgttgtatctgtgtaatacgttaggctccccgcatggttcattaacttattaagtaatgtatcattagagtaactttcttggtagactaaatactctttgtcatctttaactttcagtctattggatttaagctctagctcatccatctgcttctcaatatctgtttcgttcaacttcgtaaccttaactttactttcaagttcttctctcaacattaggtttatattaaaatacctgtcagtattgtaaacggttagtcgtttttttctcggttttctaacatcattcatggctatcctctttcgtgtataatagttttatctatctctattataccataaaaagcaaaaaacctaacataatagttaggttagttggtctctctttacatcctgaatgagctctgctagtttatgtcgtaagctgtataagaaccatgaaatatccttctcactaggtttaaagttttgcaaaccacctacgtactcagctaaagtgtgtagtaactgtgctactgctaattgatggtctttagggtatgtttctgcaatatcgtgagcaaaactatagagctcttctgatatatctctaatgttttgcgctcctatgtttttaaggtgctttttataagatttaatatccactaaaacacctgaaaatgtgtcttcattaactgagtggtatctaacttgaaaatctcttaaataatacatagctttagataggtcttccaccatattattttttctaggcgctcgtccaatgtacttaagtgtgtttcctagaaagtagctcagctcagtaggcattacattagtaatatctgcgaggtaatctagcacctctttacctcccgataactgataatgcttaggtaaacttacagggttaaattcttccattttatcctcctaaaggcttgatttatttattagatttgcgatatggtcttccatatcctcaggctctactttaagctcttcctcgtactcaccgtttctattagttagcatactttcttcttcccaattataatactcggggtcaaagtcttgttgcatttctttaacaggatatgtagctaaatcctttaataaaatagtgtgagtcataaacccatgagggcgcttcatttcatctaggtactccacatacatttctgcggatgatactctagggttagcagtcctaaagtttacgatgaagtcctcgttataaggtagcataacaaagttttctgctctgtttcgactaaagattaacataggtattttacctgtttctctagcatcaccaacaacttgtgaccaccataatttaatttctttattgtttaggaaagcgttttctaatgtccactcttctctttttttacactctactacgaaaggaaaacctgcctcaggaatagtgataatatctcctgagacgttcatagaagcgttccaatgcaaaccaccacttgcaggtaccctatggaaaggagctccccaccaagctgttagaatctttgctattgttagctcataattcgagcccttagtcttgctatgccttccgactttactataatcaaccaactctgtaacccccaaaatcatttattaataactctagtgtagcttcagcatcctcatacgttgggaatacttctagagcatcatccgaacaggtactttttattgcagacctaacagataaccataaggatttccctgttcgagcaaatcttttatcatacttgataataaagctatcttccttgtatgggtatattaaccatcttatcactgtactcactccttaacataggcagaaattcgttaacagggtttactcgtaaacaaatatcggttcctccatactcttcagagagaatgctagctgtagtgagcgcttcttctagtgtttcgaataattgcaagtctccgttaggttcttggttctcagtcacaacaatagagccaccatcaaccaaagaagcaattatacagtaccctgtctttgaagaaagaggcacaactaaccagtcgtgcactcccttatctaatctactcaccatcgttatattccttatctttttcactagcaagttcaattttagctttagcaatttctgcttgcatctgagtttcaaagtctgctagctctttagcacgagtttctttagctttttcgtagtcttcctttgtaactcctaatttatcttgcaggataatgtctttaattgcattatcatcaataagggattcaataagcttacgctcacggaacataagaccattcactaaagaagtaacatcttgtactcgtgtttttttattcccaatagcctgtagctcttctaaggtaacatcagcaggtgctcgacctgtagcactgtacattgcccaaatacctaaagcttcttctaaacctagctcttttttagttttcttacctaattcaataacattgtcttttttcttcatcttatattttcccctatcctaattctttgtataattgattgtgtacattgtccataatctcagatacattgtctgcatctttttggctaatcacgtctttttctactaagattgctataatagactgattgaatgctccttgcacccgctcaccaacaataacatcttgcataatagaatttaccattagctgaatggctttctctacatcgtcataagttgtaggagtatccccatgtaacttacgtagttcctcaatcttatctttgttcttgccttcgttatcatgtagtgcaatgatagacgtaatgtactcgtttaatgaaatatcttttgtcataataacctcctatatctattataccacaactatgtggttatttcaagtcttcttctttaacaaaaacaccattaatcattttacctttacgtttagcaattacattgtacgcttgggttaaacactcttcggctgtaagtccattttgctgagctaggatgattaatgttacgaatacatctccgattccgtcagttaactcttctttatctccacgagctaaagcgcctgcaacctccccaacctcttcagtgacctttaaaaactgtttgctagactcagctttatccaatcctttattttttgaccattcttctactaaactaactaagttatccattacttacttcctctcacgccttttggctttataatttaattcataggtacttctaaataatattcagggtttgttagtacactgtatgcccctgtaacataacgtgcttgatataggacatcatgaattgcgttatgtttctcaatcccattagcatactcatttctaaagctattaatatcctcacctagcttatcggcacctagttcaagaatagtacgtacatctcggtgattatagaacataataggagacttaagaccatacttgttaaacagggcttcaatcttaacattatcaaaaataatgccattaccccacaacttaatttcagagtattcttttagtaaatcagtaaaccaagcatgaagtttacgaactaagatttcttctgaaataccgctttcctcagaaattaacttatgcaacactcttgcattatcggaatccgatgtccaaaattgtaaagtccctaactccatgcttagtttatcccctaaggtactcaagtctaatacaaagttaaatgtacttttaaaatcaccgagctctctaacaacctcatctaggtggaaagctcctgcggaaatctgaatgacttgtgcatcatcggcaatacctagtgtttctacatctaacattacatcaatagtcggtttcatgttttttatcctccttgataggctacaaaacaatttgcgccttttttaataagtgtaaatctacctttagcttctccatataccatttgagttcctttaagtagtcctacgagattttggctactcatgtttgcaataaacggttttcctatagagtgacctgtaactaatacgtgaactcctgaagctgacctacctctatagaaatctaatacacaaacagaaccctcaaaaatttcattcttgacttcagtgtacctatcttcataatagggttggtagtagtctaccagtttgcaatcagcaaactcgtaccaaccgttataatcgttaggttcaataggctctaaataatattttactgccataagtcctccttatattgacaacatcaaagttaggattccttgactatctgccctaactgagctattgtttattaactcccacgttttgtcatgacccatcttattagcatcgtcccctacaggattgataactataaatgtgtttttatggttaacatataacttttcagctagtgatgttatttgagctttcgcatcattatctagtaaaatatatattttttgctcagggtgaatatttttcaaaatagcttttacttgctcttcagtaacttgtttaccgaaagttgctactcctgactcacctactgttaaggcatcaggaacaccctcatttattacaataaaaggagtttttttagcgatattaagattaaatactacagtacttttggagtattctccatccatactaggagcattaatagatttaacaaagctactaccatctattgctcgggtattccagtatatatagttacctgagtcgtcatgtgataggaaaactaggtggttatttagtgttaaagttttaccgctaggtaagttaaccacactgtgtgtcaaataccctatgttatgtctcgcaatatcttgcaatgaaaacccccgagagtgtgcgtataataagaatggatacgcctcagggttctgcaagttgtctactaatcgtttataccccatcggtaaaggtggggcaacataggtgtgctctaattcttccttaggctgtatttcattctttagcgctagtaataagtactcctcatcagtcagccctagtgtttgtggagacacccatttctgttcagggtcataatcgtaagcttgtagctcttcgatagcctctctataagatattccatagagttgcataacaaatgatggtggatttcctcgggaaccacatttaaaacaatgccacaacccgtctctagccccaccaccaatgttaagatataacttgtggtcatcattggcagaacagaacgggcagttgtatctaagttcgtctcctagatttttaggaatacccaactctgctgagaaaaagtcctctactgccatttaatatctaccccctagcgattgctattttttgcattaatataagcatagtatatacttcacctaacttgtagtataactccaattcatcttggttcagattagctaaaacgagttctgctcgtgcctcttcatctttacctgtaatctgttttacatcttgtgggttatactggtaatattctttaccatcataccatgtgctagagtctttgtcaagactatctttagaattttttacgtcatactgaatgtattttgtagttgcttcatcgtacatagcatcgagagctctttgaaatactgatagcccatctagtacatctttaagggtgaaatcctcgtaagggctacgtatacctaaacgggtagcaaaaccaatgacttcttgattatggagataaacttcttcattccgccatgtaggttcccctgttcgtaaacttttacccatgctaggtttattcttaaccccattagtattattgttttctaagccataacgaggaataagtagtccgtctgtatctaccgctaagtagaacatatcctctttctcactgtatttatatgtgtaatgggagttcaacgggtaccaatcaaataatgtttttacagggaagcttgcatacatgactgctcccatgtctttacttgtaaacttgccgtttacttgaagagttccgtattccccctttttaataatgtctgttctcattaactttttcctcctgaatctactaatgaggtgattccgtctactttttctacagtaatcactttctcaaatagcgattttaaattttcattatgtgtgattacgaatatactacctacagtcttttgtttatcttttagaatgtcaattacgttttcacaacctatgctgtctaaaccgtcaaagcactcatcataaacaataagattagtagctaagttagatttactaaaaattaaatcttgaattgctaacgcaatagctaaatcaatacgtttacgttctcctgctgagtttgttttgtagtcttcccctccgctaccattaacgacttgaaggtcaaaattatcactcagtgagccatctttatttaatttttgtgtgagtaaattaacctgtatatcggaacctgatagtgtagctaaatatccattagctttttcatttaagaaaggagtagtcaagtctaatacatgagaacgaatacccttgttagagaaaactttattgattaacacatcgtagtcttcaatctcaaaagtcaatatttgtaagtcattatgggttgccacaatagctttattaacttcttttttctctgctgtttttttaacaggcttaggtagtgattctaagttagctaactgttcaatactagaatctaaacggtattgaatatttgtgacttctgtatctacattttgttcttgattgtttagtgtaatcaactgactgtttagttcttgcttacgttggttaatatcattaattgtataatagatattatccaagtcgttcttcttttggtcaagttgttgctgtaacaaaggtaacgcagatgcagtaggtgcgatagactcttcgatagctgttatttgctgatttaacttctctctctcagcttctcgatgagacacatctaactttgtcccgcaagcataacagacatcgctagtacctaaactagacatatttttttgaagtgtagctatttcttgctgtttaccttgataagccgagttcagttgcacaatctgtgcgttaaactggttatagtcttccaccaagtcttgaggtacaggtggttcttctatagtagccaactcttgttctaatgctagtttctgttgtgaatactgttcttttatttgttctaccgaagcttgtgcgttggctaaatcagccgtcagaccttcaatgactgtcttttgatgtttaatcaaatcagccgtttttttgtaattctgagcttcagtctgttcctgatacgttaagtctcctagtttagcgtttaaagtctgcaactctgtttgttttgcgctatgagctaaccttgcctgagctagcttatctttagctataacttgggcttcttgatatactgcaatattagccacattctcaagtatctcttttttacctttatctgtagcctttgcgaatatctccacatcaccctgaccgtacataatactattaagaaacgtgtttaagtcaataccaaatagttctagtatcttcttattagtattagcaacggtactttgagttaaatcattttctccttggaataaaagaaccttattcttgtgtttcttatgttttcggtatctttctattcgataaggtaatttatcaatctcaaagtctagtattacactagtgtctttaccaatcttgttattaatcacgtcatccgcttttgcaccttcaggtgttatgtcgtataaagcccacggaatagcggagagcatcgtagatttacctgaaccattagataaatacgtttggttcgtattattaacaccttcgacaagaactaaaccttggttgtctagatttagctcaacgtgacctatagacctaaaattgtctatagtaacctttttaaagataaacatttatgtttattacccctctcttatttgttatacctagtatactacatatttacttgtttgtcaatacaaaaaagaccctttaagggtcttaactcaaggcttttgcttctctcaaacaagctaatgctttctgctctacggcattccctaactctttagattctacataagcagagacaatttcttcttctgaagtctctgctgtaatacctagtcgggaaccatcattgtattctttctgaactgttatacgcatattagttaagttctcttcatcacgaatagtctgaactatttttgcctgctcctcgttacctgtgaacctgatataattgtttcttaaaatgtcatcacttgggatttcatctcctgtaattgtgataaacattttattaggtatctcaatatactctgtttggactttatctccgtcctgataaagtaaatgataacctttagtttgcccttcatcagagaaacttgtttgtattgtatttcctccatatatcatgtttgggagcagttcttgtcttttgtgataatgtcctaggtatatataatcaaacgcctcagggagcaaatcagaggctctgaaggcaccttctaacgtatgagaatactttccagtagttgcaccctctacaccaacgtgagcaactaatactttaggaagtttattgtctttatgtgtatcagcagtcttggctaaccactctttcatttcctcagtctcttcaccgtatgggagaccaaacaacatgaatgtagggtgcacaatgatttgaggagtactaatcactgttacattaggtaacgagctgaaagtatctagtgaactaactgtccttaaagaatttgttacactatcatgattacctctaaccatataaactgtgacatctgagtatgcttcaaacatttcaaagacagggttgaaaactctagagtctacataaatacgtttatgaaataaatcaccaccaaagataacaggtaaatcgtcctctctagcttgacatagaatagtctctagtgtatctaactgagctttgaacctatctgtatgatacttagcatcagggtgtgaaaaatctttaaataaatgtgcgtgaaaatcggtgaataaatacgccaatggtttctttttattgctagtcatgtgttacctccttaaacatttttgtaaacatattaggatgtatcattttcttaccacccatatgtctaccgtagtctacaatgtaatacccttttggtatatggttcttagctagtaagcttggagcgtaatataactctagcttactgtcatattctactttactagaccctagaaaagcctctacctcttcatgattatgtccagtccactgaacataagtgcatagtggggagtaaggtttgcaatatttcatgtcaaccttcccccattctgattggtagtgttccgtaatatccatcagcatcaaactctaaaagctcttctacagtcatgctctcatctgcttcaggctcatcgttcaaaattctttttgctctgtaactatcagcaagagcttcagtatcaaaaataccttctgcatattcaccgtagttaacagttactgtatacttttccatactatacctcctcgatattattgtgctactggttgttggaatcctccttgtagtgcttggttcatcccatttaatttgttctgaacatcttggttattgtactgtgcatcttttttcttctgtttacggatacctgttacactttcttctaagtcctctaagatagcttggtgatgtaacacctcttggtcagttaaatcacgcaaagtcatagtttcatccacatatttaaaaggtaacattctgttgaaatctgctcgggttctattacgtagtttatctacatacatacgagaatacccttgctcctgttcttctgtagtttggttaatagttagtgcaatttctacggggtttagcttttgctttgaaccttcaatcatagaagctgaacgaaactcagaagctacacctgaacggttcaactgtgagaatacccaacctaaaaagttgtattcttgagcaattctacgaatttcttctgtaagtttaccgcctgcacgagattcattatcggaacctttctcaaaagggttaatcattaagtcggggtagtcaataatgacaacatcaataggtttacccaagacaagggtttggttaattatctcttgctctaaacctgtagggcttagtgtacgtggcatatacttagcaattacaaactctccccaacctttttgaccttcagggtttaatagttgattataagctttttgaatttcttcatacaatgaatcattcaaaacaccacctgccattaaagagctcttagcttgctgtgagaagacttgttcgaaacgtagtaccattcggtcaagtttttcctccaatggcaagaacagcacgttaagcccctgcatgacgtagttacgaactaagttaaccgcccatgtagttttaccaccaccataaggtgctaaaattaaaccaagctccccacgagccagtcccccgtctgcaatatcatcaatagcttggaaccctgttttaaatttgttcttgtgcatatgagtaagtaagcgtttcttactatcagaatctcggaagaagttgatagtttctccaccgccacccgcactcatgatagcaatatcttgaagtttactaataaggttgttaattgtatcctcatcttctagattaccgttacctacttcttttaataaagtttgttgaataagtgttttacgaatatatttttgcatgttctcattgataacatcctcattttggtcgaatgaatcaatagtgtataaatctttaactgtgtcataaaatgcttgctgtttttccgcattagcattagtttttaccattttatcttctaacataaccaacaatgtttctttatctaacggaacattactagtttgataataacgattaatcaataaggcaatatcaatatacgccttatcatcgttaaaagtatttgtaggtatcttagtaaatgtttcttttgcaaatacagggtctttaattgctctgtataggatttgtttttgaatgtgtgtttgtgacattttgctccccctatttttttgctataaataattttgctcttagttctaagcctctttctgtgtattcatgttgaacagctatctcttctctaaccgaatctaatagcgcatcctccacttctcttaagtggtattcaatcaacttctcttggttgataacactctcatcaaccatagcaagttgatgtggtggaatagtcacagagtttgctacttgaacaatttgcttattgtcaataagtagcttatcaaatttgggtacaaatgtcaattgatttcttaaagagtttagttcttcttccaaagaatcatactttttagccatcgcatctaattgttctatatgtctaactcgttctcctgtgtgtttagctctaatgctagctacctcgctatcactggtgtatcctttgtagcgccaattgttaaataagtcctttagtcccatatgtcctagtcctccttgatattaattatctgtgctaaatccaacatcccaaagttatcaattgggattttttctacaccgtagtttcgaattgcttcacctacatcatgagagttaaccccaatacctgtatcatgagcaatcattcgactagtttctctaaatgtgttagctccttcgatagagaagtccatcagctcaccctgcttagcataatgttcaaactcttctaaagtggtaatctcttccttgctcatattcccaatatacgcatagtagttagatatatcagcgttgtttgccataacagtacgtttaacctcatgtatctgtgtagggaaagcaagagtgtattgggttgctgatagagaatttttttgtgagtataaggctacttgctccttaagataagcacgaataatatttttctcagcttctgaaatgtcactatccttaaggtctaataatactgtgttgtaatatctagttaaccgttctattctatgaacataattattgtgcttaatatcgttagcatctaactcaatacctaagtccccatagtccactttagttaaccgcattgcattaacagacatctcatctatcaagttgcttaagttaccacccatcgaaacacctttgtatgcaaactgtaaagcttgaataatagggtatttagctccgatatacagtacccgctcattactcatcttacggtcgttaaacctatttcgtgtccacgtatagaatctaatctgcttgttataacgttccatagcatcatcagaaattagtgcattcacataaggtagtgcattaggtctagcttttttatgctcagctaagaaagtaacataatcaaactgagttgttaagtaccctaatgggtttatccctttctcatcaaaagttctttgtagtcgaacaaaaacattataggcaggagtacccacaaaatgataaggtaaaacatcccaattctgtgcgtattccatagctttcttgttcaagttgtataacctagtgtcatccacatgctgaagcatacgttctcttgggaagataaccgcataagcattatacattctagagacaaggtaagctttgtaatacaactcaggctcatcaaagttatcaaaaaactctcgggtaacatgaggcatagtgtcaagcatctcattaagttcccactctctgcctttacgagctttgataagcaactcagcctcggttatctcggtcttagttctatactttctaagtggttgaggtttaataactcggggaaacatcaaatctctaatttcttcagcagtctttgtgtctgctgttatcggattctctttaggttcaaaatttaaaatgtctttattaaacacaattactgtccccccacctgttcttccttttttagcctcaacttcaccaaggttcaattcttttactttttgaatgtagttcgttaccgttctcacacttacattaatctcttctgctagcctagttctttgaaaagttactgctaagttatctccccaactagctgatttagcagttaaatggtttataaacgtaaggaagccatctgaaatgttaaattcaattacttgttctgctgtcaaacacatttagtggctctcctcctttagtttatttgtatatcttcaatatcaaacttctcttgaacatatgtttttctacgttcttttgaatgcttcaacaaatgtttatttgtgtagtcaatgaagtcgataattgtggcaacgttctcccctgtttttttcttacgtagggctcgacctacacgttgaagtgtttgtcttagtgatttaccacctgcacctaatattaacatatcaatacctgaaatgtcaacaccctcatccgcaatcgtagtagctattaagacttttaatctaccttctctcatagcagttagttgctcttccctataatcaaggtctaactctccgtgtataaaggagttttctacacctattttcgttagcatttcagaaattatatctccatgctccacaatattaactaagataagcacacccttaccctcagagtatgccttgtttgctaattgagttattagtgtgttacgatattcattattaacaatacataactccctagcaggcatgtaatctgcctcatcataaccttgtgggctaacaatagggaacatagttattttaggttttgctgaatgtcctaaattaattagggtctcattggatatttttataatggtcttattaaatatcgcttgcaatctctgccatagcattttgtcttttctatcaacagaaccagttaatgctattctatactgtgcgttgatacatttcgttagtgaatgataccaagtgtctgcactagtatggtgagcctcatcaactatcataacagcaacagactccaaaaagtctactgcttcgttgtatttatcaaatacctttttatttttagactcaattattttttgatactcagcttcgtatccttgaatcctgaactttatttcgttatctgacccgcaggtgtacagaacatcctcaagttccattaaaactttttcatccatcttggattttttagggtaatttttaataaggttgcgtaaagcaaatctttgattatatcctttagctagccttggtgctatttccttagctattttcttaacaacagcatttttacctgttagtttaagccctttttcagggtctgcggttaaacttgcatttaatgtaggtatcatcacaaaagtaatttgttgaaagtctttgtgtcctgcaccataccgacctactttgacccctaaccgtttctctattctatcaatggattgtgtaaagattgacgagttattcgtgaagaatgcaatacgctcccctctctctaaatacggaagtaattgttgcatgatagctccacctatttcagttttaccaccattcgttgcaacctccacaatacctacttgcttatctattgcttgaaaaacagcatcgaactgataatctcgtaaggtaatagggtcatccccatctccaatcaattgaatgttgtcaggtaaatcttcagggttcataaaggggtcaggtctatcatctacaatactgtatgtaaatgtgtatgttccttgcaactcccctaaaatagagtctacttgatttaacaatcctgtatggaatgagtcgtcttctttattgtaaaaatctattataccgtcccaataccctgatttgtaagcagggctataaaaatatccatcttgctttacacctaagtttctgtgcatcgcatcttggactaagggaatcaattgttcttccccttcctcaaaaataatctttgaggtcataatatctacaagtatcttcattgtttccctcctattgtatctatatccattataccacaataggagcaatttaattctacttgatttaattgtatatctataataacatgtactcaagtatttgtcaatacaaaaaaagcctaaccatgttagactttatccagtgatttaaacttttctattaaactatctacttcggctagcttaatatccaacgcctttgacttctcgtcaagcgccctttgcgtatctgccattgtttgctcttgaattgtaggcttaaatattaaagcccctgatttagattgtctgtgtatttcaggcatgttaaccctccttaaaaataaaactcctacttacattataccataagtaggagcagttattactattcactcttcattagacacattaatcgttttgcacgaggtcgaaggaatgaattttgagttgtcatgttcaatctaaccttgaacgatttataagttgctgtacctgttgcaaccttctcagcatactcaagtttattgaactcttgtgtttgttgagttaccgttggtgggttagtaaaggatttccatgttttaccttcatctaggctaaactgaggaatcactgttgtgtttgatggcatgaatccatcgaatgaaaccttaactgtgttaaatggtgcatcacgtaaatcaatagtacgagatacgtagctaccttttagtgcagttaggaatccaacgaacatgatgtcttctaatgacaacaacggactaataaatctgttggcatcgaatgtagctttaagttttacctctctagctacttggttaacatcaatatccacatagttggcaataggtctccattctttgtcatcaaccgttacactgattggctcattctccataactatcttcatttcccatacacaacctgtagattgaggagttaagtaagtactcatcaatacaagattatctgctttgacgtttttcataacatcaaattcgatagtagcttgtgggttgaattgagctgtgtagatagtgaatttcatatctgttgcttgatggattgtccaagcagaagcgttagatgagctgaatagtacaccttgtaggtatgggttagagttaacagtctcagttggattgtcaatcttaggttgtcccattgttgcacaccacatagtgtatttatcagaatccgtgataacaacgatacagtactctttacctgcctcaatcattaacgggtcatcaaacttaacttttgtctcagcacttgcatcatcggagataagaattttatcaggagtaagtaccgtttctgcatagatagtcttgttaggctgtccaccttctgaaataccacgaacctgaacgataacgttgtgattagggtctttacttgcaaagtgtaaaccgaaactggtgataactctattagattgtaattggaacgattgtgccaatgggtcatacaaactaattgttacacgagttctaacaataatatctttagttgttttcttagtcccttgagctgtatacgtagcagaagccatattatcattgtttctgatagttacttcacgtacaccacatcggatacccgcaggaactgtaatagtacctttgaatgttccatctgcattagagataccagtacctgtttcagaacctttcttgtaaccttcagcaggagtaacaggaattgctaaaccatcgaagtatacttgcaggttgtttgtattaggtagtaagttctctgcctcaatcttgatgtcgatttgtctcatgaactcaatcatgctgtccatcgtttgttgtccaccactggtcataatagtacccatgatgtcaccttcggcaccttttttaacgccttggtaatctgtccatgaagctccatcatctaaaacgatgttaccatatttattcttttcatcttgtacccaagactcagaaccatgtttccaccaacgtttaatgttaacagttgatgtttcttcctgtgtcactgtaatacgttcttcttcaatccagttatcggctgaaggttccagttttagtaacccttgtcggttaaacacgttatatgggtttacgttgattgcttctgttgcaaaaggttgtctaatttctacaacctcagtaaatggtgcagtaaccaatctaccccaaacatgagcgttagagtcaccttccaaaatcttaggaacaattttgttagcttcatcgtaaggtaacgtaatttctgcatcctcaaaactgaaagcgattttcgcatcagggtgacttacatcgtatttatctaaagagataaaaccatccgagaatactccacgtaagtttaatgggttctctcctgccattgcaggttggtctagagcattaactgcttcgttatactcaatgttctctacacggaattttaatctctgtaaatcttccatagataatctatcaatagagaatgaacgagcaattgcggtatcagaatcagggtaaacagttactgtacctagacgtaaagttagcgggtctaagtggtttggtgcttctactaaacgaagagattcaggttgaccttctttgatagtaatgttaccattcatatcaataaccacaaggtctgttctagctagatagaagtcatagtctacgtttactagtgtttcgtctacaggtttcgaacctgtcattccgttaaagtcaatccaccactcacggttatccccttcaccctcaatagtgattttatagtctgtattttctaacatagctttgttataaatatatgttacaaaataagtactacccgcaggaggttccgctccgttaggtgcccatgagattgattgtccgttaattacttggtaatctgtaccttgttggaactcttttgcattagctccttcagtccaaactttttctactttaataacagaagtatttgctaagaagtctgtacctcctgaagttactcctcggttaactgtttctttagttacacgtacttgacctgtaactcgggtaactcttgatacgggagcattacctagtttactcttacgagttgcgttttggtaatagaatccttcgttgttaactgaacgtacctctttagactttttaaggtctaatcttgttgatgtaggtttatctactttataccctaacacataagcacgtccaccgtcaactactaattggataaactcctcagatttagtcttatgtttctctgtgtacaagtcataaccatgtactcggtatgagcctgactcatcgtaagttctttccgctaatactttgttaattttatccatctcagggttttcagtattgatgaatagttcaccatcatcaaagatatacacaggagcagaagcattatcattaactgttaaaataaccacttcttgaagtctatcagctccttcagagaaggcagaaggaacaccactagtttggtctagtaacgtagggtcatcctcagatgtaataacatatctttgtagtttaaccccaactacttctcttcctgttcctgccattgtaactgtttgttgcttaaagtttcttactcgaccattaagatatactaacccatctttaactgtcaattcgttacctgttttaatgaaatccatacctgattgtaggttaccatcaccaaggaacgcatcacctagtttagctagaccgtccatagccatttgctgtgcttcatttagttcagcttgttgcaatggtctatcaggtctgtatagtaccatatttctgtcttgttccgctctaaaacggctaagatatggtgtttggttaatatcttctaatttgatttctgttgccaaacgttctcactccttataaaatttctttggtgttggctactgagaggatgaatctctctttaattcgtacttcttctgttctattttggaattgtttatttgcaaagaactgtagaatacctgtacttttaacctcagtaggtagtaacactttctttgtaactccatctttaggtactaaccctgaatggatgcctacttgtctatatgttcctgttggtaaatctgttcctaacacttctgtttcaaaataaactagtgtagctttttcttgataagccttatccacaggaatcaaagcatatcttgaccctccatatgttatggtagggtatgaagtactctcactttgtgttagtggtttacacaggcttactttatctacttttttatacccaattacttcttgcaatactgaggtatttgggtcttccgcaggaggagtattctcatttgtccatgcagttttctttccgattgctagatacgtactgcttgctttattcacataatctaaactagcttgcactctagcatctgtagtagctattgccatttattaacctcctatacttgtctctaactattaatatagcatataattgcaaaatagggcacttaaaagtaccctataatcattataccatagattttatgctttaggctgttacaacctcagaaatgttactcacaagcaatgatttatttatatcataccctgtagtcattttgtttgtaaatgtgtaacctacataatcaatatctacaggaaccttagctgtattagtaacatctaactgaattgctatgagaccttcagaagagatataactctctatgtttcctacctctatattagctaacaaatctacttgtgtcaagtctttacttgatataacatcccatttgtttaattcaaagtcttttaactttactttcaatttagttgggtttgttgggctagtaagagaccgtaagacaaaagatattgtagggttcttcatgaaagaactatatttacccttgttaactacagaaggactgcctccgactaacttatcataagacttagggaagtttatggttaagtaatctcggatgttgaagatgacgtataagtacttatcttcagtagaccgtctatctactaaaccgtcatagttacctagagaagcgtagctcacattatcaagttcagttaattgggctttaacttccgcaagagtagttgtgtctaatacatctattggtttagttacctcagcaaacacctctaggtttttaactgtaattaactttcctgtattataagtggcaaagaaagctaacatagcttgtggctcgtctgctttcgatactctagcacgaaaacgtaaggtatatcttttatattccgtagttgcatttgaaatagttactctgttagaagaaaatctcatatctgaatttcccatagtatctacttcttgtaatgagtaccttgttgttgtcccattttggaaataaaaatctacagaacctgctactgctagttttaactcgaaagtagctttgtaccatatgtcagtaccattagtatttattgcaggagctaaatcccaatcaggactgttaacaaactctcgacttgcagtcttctcaagtttagagtttgcggaaaggacatttccagtctctttgagtgctgttccatataaatgaatatgctctcttccgtggtcaaacgcacctgctaaaacatcttccccattcaacaatgacctgttggtgtggaatatgttactagttactgcatccccacgtatatcagttgtcttagctgaacctctaacctctatacccaaacctgttaatcggtctagctcctgaatgttatctatagtcatttccgcataaggagatttaacatgctctgaggtaatatcatttcctgaatcgtatcccacataaaataatacacctgcgggtttaaacgcccatatgatgtcaataatctcaggagggaaaggtctatcaatggaaatatcaatgatagcaaacctatagtaataacccatcaaatggtcttctccattcaatttagagttattagtatagaaaatattcttccacggctcatatatttcaatattggcatcattatcttttagaaaccatttaattgcatcaattattgactgaatggttcctctaggtaagagtgtatgtcgaatgatatgctctctgtaatggtcatcttcctcaccaacttctctatatataccaaaccaatcaccccatcggtctaagaactctcctgtagctgtctctagtgaggattggattttgctttttattgtgtcttgctctgcttcgttaagaacgttatctagagcattaaggatggcaaagttactgtcatccttaacctctagtcgtttatctctcttaagcagaggatgtatatgttttttaaaatttcccataatatcctcctatattaagtctacagttacgtctcctgctctaatgatttcagacttttgtacttttacgttttgggtgtaattatcaatcttgcaatcataaataagaacatcatctatattcataaccgcttgaatcaaatcagctaacactaattcttgtgagacttgttgattgtttaagtagttccgaactacggatgttactttattctctgtctccgagtttacccgactcttgttagatagggttactgtaatatctacaggtaacagagttttagttacaggataaactaacaacctaattcctgcgggtctataattttctatctcacgttcaatagcagtaatcattgtaggagataggttaccatttctatcatgagcataaatctctacctgacccacttgctcatggatataaacacctgatacttcctcaacctgcctagtaccatagtctaaagcttggactgtagctctacctctagattctacaaacgcatgaaatcttttcttaacatcgttgatactttcttcttcagtacctgttaggaagtcttcttcgttaaatactcgtttgacattaccaattccattaatcatgcggttaatatagcctttaggtaaattacctatatctcctgcacgggtagcatacacatctactttaaatgtcacggttcctgcgggtattaaatactcttggattgtttcataagcaatagacccttggtagccttccataatagagtcaaactgtgtacctctagggataactagtgcatcctgagtgatagtgtgaaactcaatggttacctcaccataagcttttttagcctctcgtttatagaaattaaatccgttaaggactccttgttcgataccccacataatgttttctctacttagcatatagtactgctctatttccatagaaaaagcttcatagattgacaaaatagtagaacctactgtgaagtcattaatagcactcgtattgacaagagttacgtcaatcaatcgtgataatatttctgatagtctttttaatctcattttattcctccttgtctactacgactatttgaccttcactgtctccttgaaccaacagctcaaaagattctctcagtgaccgtatctcaactaaaaacctacctgtgtactcatccccattaacctctgcggaatctaacacacaatttgatacccgactatctgtctgaactactctacaaacctctatttcaataagcttcatcgtgacttcatctgctttaccgaatagttcatgtagtttagaaccatattcaggatgtaatagtaaggaaccctttcgagtaagtaacttagcagttaatgcctgcttaaggttatcaataccttgcacagtagcaatatctcctgcataattatgtgttaaccctagtagttcatcactagtaccatatctgttataatatttttcgtctgaggtcatgttcaagtctctaccaaaagtaagatttataatataatcttggtcacgtctatttaatttattaacatctgtgtccagtaaatctgcttcgaaaggtataattaactggtctccccatactactagatgttcaatatcttgcaacttcataaagtcgtcactaacaatatatgggtactttaagttgttatactcagctattgcaatccaatcagatacgtttcctgtaactttatgcgcaatactctgcaaggtatctccttgcttaatagtatactttttatatctagccatttgcaccaccctttaataaaggcaattggttttcaatatagcctactgcaacactcaagctgtgcaaccgctcaactatctctacatactcatctttatctcctaaaaaatcaattaagtatttgatattctgagtggtttgtagtaagtcttttgactctaacattcgaagtagagagttatcttcctcaattgcatatactaaagcaaaagaatcaagtataatactttgcgctagcttatacatataggggtgaataatactaagattactatttatcagcatgattgtcaaggtattattgtttaactgtttacctgtttgttgtatctctttgagatttatcttgtcactgactcttgaacctgcttcactaacctttagttgtggggtatagaaccttgaaataaaattaggttcctcagtgtctataacatttaaaattacatcaccttcagggtcaatatttaatgttgaaataaatctcattaagtccgatgattgtgttacttttgacatattaaccctccccataacctatttgttgttttatttcatctacaccatatttataagcaccaacggttcctctagggttcacgaccccattctctccattacctgaaaaactagctaaagcacttgctccaatgatttgtcctgtagacattactctttgattaatagcctctcgtgagttgctatttgtgttttcagtatccccaccaatactagggacattattaccaatatttgggtcaactacctctctatcaggtggtgtccctgcatctcgaataacaactaaacttagtttatagttatagagtattggttgctctacatctcgttccagtgaaatagcatcaggagctagatgcacaatgtagctttctccatcagtgaagttatggaaggtcagttcatttactgacctattaccattacctccttgtgatgcgtaatctcggatataagaacgtaagatacgcattctgtctgcaccagtacgaccttgagcatcccttgcccaacctgttgtacctgaaaaggtgattgtctctaagtctttaccaaagtcttcgatgataatatcggactttgttttaagaatcgttgccctttgtggttcactatgggcgtagttgtttggatttatcttgaaaaagtaccatcctccgttggcaagctcaagcgctattcttctaagatatgacgtatgtccatctgcttgtggcattatcttgcctcctctagtttattttatggatacgggtcacttgttacataagttacagtacctgtaactactgcacttcctgcttgagtgtttgtatactttaatgttccgttagatgcaatatggatacgtatgggttggaaaaaagatgtccctgcattacgtgttaacactaacgtagcttcatcaataggagtataccctgttgggattgtttcgtttaaagatacattctctcctgcggtagaccagttttttatctgtctgcccactgatacggttacagtatttcctttacgtacaatattagccgttgttgaatacccgatacctctattacctagtttccatgttaaaccaatatccccacctgtttgccatgcaccccaattcccattataaaagtttcttacatatgtttttggtgcgccttcaaaataggtagtaaaagtttgcttagctcctgcgtgttgttctactaacaatgaaaacgcataatttacaggggtatttgctattgtacttgcatttgctgttgtttgacatctataaaatcctgctgacgtataattatttaagttatcattagcaggaatgtctataggttcataaccgccaagggctttaactgtttgagattctaaccttgttgtttgaacattgctagcaaacacctgtgtagcatacaaatcgtaacccatagctaattgtaaagctcgctctgtattagggaacattccaatacctacagattttaacttagtatctaaaaatagtagtgggataccttctgcaacaaatgtttcatatgtggttaccgaatctaacttatcttttacctctacctgaacaacccaagagtacgtgttatctaacgtgattgtagtattaggtggtgaagatatattacctgaacttgcattaaatgataaatccaagtcagcactccatatatcacttctagggttttgcttatatctaactcgtgcagatacaatagtatttttctcgacaccgctaactatcacccgagaataagttcctgataaggcaatttccgtagttgtttcataattattaacccgagcaataacaggagatatttgtggtttactataacctaatatagtaaccgatgtactccataaccctgagttccctctactatctataacagtgattgttaagttaccattactgttcgcatttgtagtacctaatgctatagttgttgctgtagcggtgtagtctatctcttttgtagccccacctaaagcaattcttatcttagataatgttgctcccccatgagatgttcccaagtttgcaggaatagtaacagaaatctgagataccccttgaataataatttggtcactacctgtaagagctactgactttgcattagtatctttatatgtgctacctgctttcacatcaggagcatacaaagttgtatcgactctagcagttatagaacttattacagtattaccaccaaactgaactccatcaaagaaactctgaactgttatactacctacccctgtattattatttttaataatattgagcatagtatctacatcagattgtgttagcgggaaagtaaagttttgagctacgcctgtaactttcttactgaacgaaccaaaagtccatgtagcatcataactaaatttggctcctgtattatagttatttaaccgtacagggaatcctgaggtactaatagtgaaatcagctactgtacctcctgcttttgcgggagctgttacattgtaggtaaaggatgtccaacccccaataacggtacttccgtttcgggtctgtaaatctactcgacactgaacgcttgttctgtttgccattttacttactatatttttccgctcggcatcagtaaaattaaatgttcccgaagtccctaaccctgtgatttcttttatgaaagtcccatctacgtgtatacgggctacatgagtaaaacttgaactagctcggttaatagatatagaactgttacctgtaaacacaaaattactacctgaacctgtactagcccttggtattgtatttaaagcaacattacctcccaccgaaggcgtttggtgccctgttcctgaccagttaatatcccaaaaatgatttgcggatatgtttatctgtttagacccatcagcgttatgccctacgtttacagtatgtctacctagttctcttgtttgccctgcactaaccgtagacgtttgattaaatgatttgttattcccattaatactaatattagttggacttgctgttgcatcattgattgtagagtaagaagttactccacgtatctttaatatagcagtgactgacgttgtgttagcggatatgttctgagaaccactccactctaaaataagttcatacgcattgtttgcgaataaggttgtccactttccacttaatgccatttatttacctcctaaataagtcttctcatatataattatagcacaattacagcaaaaaagggagcatagcccccttttacccgatgaatgcccaaccaacgttcttgtcagaatcaattggaagtactgtgattgcacccatctgtattttgcttctaatttgaatctcctctacctctgtagttttaccattcagagtgaatattcgtgtcatctcattacctacctgagcatatcctgaaaactctgttggagtaatcaaggtataaccatttgtttgattatttttaactgtaataccgttaatgtcaatcaaaacatttgtattatatatctcagatgggaatggttgccatgatagtgctagagaaccgatgttaaacataagaccactcattgttaccgtagtgtttatgttaccccatgccaccatttgaacagatatgtttaaatctgctgtgtcgaacgtataggaatacttagagtactcccctactgcgacaccttcctcagcaccaatgaaggctaatcgtttaccatcggcaaacaactcaacacctgctccaccgtgagcacctgaactggtagattttttcataaagaacgacattgtgtacgttcctcttgcaggcattaccacattctgaattaaccgaactccgcctgctttatggacaaatcctgaaccaaaccctaagtttgctagtgcattatcttgggttgttgtcgttaaactagtaccatcagtagacacatcctcaggtgcaggagaccatgccgtagcactttccccttgctctactttaaagtctttaataaaataatatgcccaatgagttatattatcaaagtctacaaagttaaatgttgcattatagtttttaacctctgcggttacttcaaagtatgtccagttattatcagcggtagcttttatattagttgggttggtgtcacaaatgtctaaggtgaatcctacagctacattttgactgcctcttacataccctgaaactgtccaaaaaccatttcctgtaataactttaggtattcgtattgctcttggagaagcctgtcctcctgtaaaattaaatccatttacatcattacgagcaatacctgctacgttttgtttattttggatagcgatagctttactaaagtagttcctaccattaccactagtatctccccaaaagtctaaacctgagaaccctagggagttccttagcatgttgataccccctgcttgttggattttaaaatcaaacccactaacaagctgttctaactcagattgtctctcgtatagggtactatatgcctctcctaacttttgctctaacaaactttcaaaggagttatattgactgtttaattggtcaattgtagctaagtctagtaagtcttctgagttggctttagtatcaaataatgaagtgaagtcattagactctaatacagtatttgtgatactctcagaagttattttctgctcagcacttgacattctatcaatcaaatcacgcccatcagaatcgttgaacgcaccaatttctttagcctcagtaggtgacattttaacccatgctgtaccatcccatcggttagcaacgttcggtaccgcagaggtgtctacccatatcagacctacagcagggttagtaggtgcgctaggttgtttcatgatagcgccctctttaccattaatctgaacctgtaagtcttgcttatccgtagaatcaactaaagataacccgtttatatacgtagtatctccacctgtgacatctctattacagagcaaacctaattttaggtacgtagttgcactattcataggtgccccacctgccgttgccattgcagttgtgtttgttattgatgtgtagctcgtagttaaggttctgttactatgattatttgggtacatgtatccgctacctgcattagtcttagatacagggtgtcctacaggaaaactaccatcggaggtcattttatttctgatattccaaggagcttttaatgttatctttttattagttgcatcaacagcaccgttcttgtacgcataggtatacgtgtatcttgtataggttgtaccatagtttttaccactatcatcggtatagttccatagggcaatactgtgttgatgtgcgttatctcctaagttattaggaaactgtgatacatcatctagccaaacctcagtatctccaaccttaagaggcttagctaacttaaccgttgtcggttttgcatctacaaagattaaacctccgcaatgttgaacatcaatcttttgcttatctacatcatatggtgcataacagaaataacttctagatgtaccaaacttagacttagcgtaataacttgcttcataaatgtggcttggatttacaggaatatactcatctgtaaaccattgacctgcacccgcagactcatacttaaatgaacccccacctactattttatctaacgggtcaaaaaccagtgccccaaagtttctattagaacccaaagtaccatacccattagttactaaattactcatacgactgtctataacatcaatacctgttgtaactgcgttctccatatcattctgcaaatctaaatccgacttcttccaagcagtactcttcataccagtttctagttgagttttagagaaatttattgcggtagaacctgcaaaacctgttacacgacacaaaataccttctgtagctgacgttattttagctaaaactacggcacgtttaaccccatcagaaggggtaatagtatctgacctgtattctttccaagagccattatccataagatatatacgaagaacagcattaccacctttaacagatacatctgctgaaaaggtcacatagtccccgtctttaagcgctgttaacccataattaggtagtcctactctagcttccgctgtagaagaggtacctatattataattagcctctgcccccgagtttggaaccagtttaaccgtttcaccttcaaaagtagttgttcctcctgtggttgaatagtaccctacatttttaatcattagccgaggatattggttatttcctgagctgaatgcgatgtagttcgttcctccaataggtgttttagcaatctcatcttgaatctcagcttttgaatctaaaggactaggagaccaagcagttgctttactaccagtttctagcttcattcctgctatttgaactgttcctgtattagcatccgccatacctaaagcatagttaatcttggttgttgcttctgcggtcttccaagtataagataccctagtccactttgtacctactgttttattagtaacaacagtatcttctgtagacccacttttctgtaaagtcgcagtaactgtacctgttttagctttagcccaaaaactaatagtgtattctgtcgcaggaagaacaactacaccttcttggtaatacccgaacttatgaccgtcccctgtagaggtttttgatatttcaaaaccataccctaagttaggcaaacctgctacttctactcgggctctagtccccacaacagcagaagaactagcccaatctgtccagtatgtgttatctagcactaaacctgagtttcttaagccgtttgtcataccaatttcggtatctttgatttgttgtgctacctgtgcttcagtaaccttttgtgagatttggtctgcttgaacttttagctccgcagtatgagtttcgacagtaccctctatagtctctactttagtagctagtaaagcaatagcctctgaagtttgagtaatcttagtttctgcaacatagatacgtccttcatgcgcatcagtaatctctttagctttatcagtcacagctcttaacaatttaactttttctaggtagtagtctgaaaatgttgctcttaatcgttcaccatcaacagctacagtctctcccatgtcgtcaaatagtttgtttcctgtaacgtaagataccaacgcattgtatttagaaacatagtttgtggtagctacctcatattttgttgcttgagctactacactaggatgttctttaacaatagtgtcgtattcacgtttaagctcatacttctctacaggagttagtttaccatcactagccatatctgcaattttagaattggctgtgttagcatctaactgagcttttgttgcttcttgccatgcgtttgttgcatctactgaggcttcagaagctttcttcattgcttctaccgctagttctttaatgtttaaaagtatagctgttaggatagctagacgtgcatcgtaatacgccttaaacttcgctctaaactcttttgggtctatcgcagtagtttcatccatcttagcaaacaaagtcgttagataagcgctcagggcgttgtaggcactaacgtaagttgtcttgtctacctcatactcatctgcttgtaaaacataagttgggtactcatcttgaataataacccattcccgcattaaagtatctttttctacaggagtaatcaaaccatcgtcagacatgtcatcaatcaacttagttaaccgtacattgtcttgtttaatcttttcaatatctcctgcaataaggttcacttcttcagttacaatatctttaacttgagcttcggatactttcgtttcaattaaacctgccataataacaagctcactactaatatcgttaacttgggtttccattatttcagttttacttgcgataacagtaagcgcttcatttgtctttgttacagacatgtctaaaattacaagctttttaccttgctcgtctaatgtattttgaatctcagtaaggtctacatctacatttaacccatttgagtaaataccgtcagctttaacttctaggtacgtatctccgttagctaaaaatactgtaccatcctctgcgatacctaactcagagctttttagtgcttgccctacaatcttactatcaaattgttttctaagcttaactcctccgttaggagtcatttcaaagtaagttctccaatcatctgctttatccattgtagacatacgaacagtaccgtcatctttaacatgaaataaagtaatatgattatcttccccacctgattgcttcataactccttgatgtttaaataagatatttggagcatatgggttcattggttcaatttcttcatcgtttgagtagtatgatgattccagttcactatattctgtaccgtggttcccgtctgtcaaagccgatgttttattatcatttgaattgaacattaagaatgatttacctgtaaaggttacagttcggttaccttctccgtccacattctcatacgttaatgaagggtatagactaaacttttgatttgtttgtctaactaaagtatcatcttgatagtctgcatttttaaacggagttctagacagcatttcattgactgtagaatttccgtatacactcaatacaacaggtgctaatttattttcattaacaaaacctacaagcacagtatcccctacattaacaggtttaacttgtccgtaaggttgtccgacagagttacgtccaccaaactcaagaggaagtctggcagaaaacttacccccgtcagtgtaagaactctgaaatgtgtccttattacctgacgtaacaaggtctacagaattatattgatagtttacttttattacttgggctaatatcagagaagatacttttgtaccttctttataggctctttcccattctgtacctagtcctgattgaaatactctctctgccatttatgttcctcctaaatttgtcttctcatatattaattatagcacacttactcccatcttagtactgcaccgttgaaaaactcccaccagtacccatttgttaagtctgcacgttctaaacctttactagcatcccaatctcctgtaccgttaatactaataaactctccttctccatagtaaatacctacatgaacagtatctgtaccgaaaaagattaaatctcctgctaagagtttatcgaaaatgctgacatgcttttgaccttcagtaaatattactctaaatctagtgtcatgccttatctttttaacgttaacttcagaagaaccaccaatcatttcaatccctgcatagttataacaccagtagattagctgtgcgctatctaaaacaaaaggaggtttaccctcgaaagggttagccttctttgctttaagattgccatgactatatactgataggaaacctttatctttggtgaatttgtctgcgtattcaagggcttgcatagctacagcgccaccttttgctcctaaacctacattagccatctttcttaactccttttattctatagtagtacacaggtaaacctcttgcatcccccatgtaaccttgtgcaggtgtctctgcgataccatttgcacttgaactacagtgaataatattgtttctgtctaagaacattcctgtatgtccatctgcatttaatgaagctcctttaacccctgctacgaaaatgtctcctcgttgtacatctttcttatctacagatattaacaaactaccttctaattgatacaaggattccgtattacctagccatgtaccttcaggtagaatacctgcatatatcaatgcagagaaaacggcggctgaacagtcatatgaatttggtcccgttcggggtccattttcacccatactataatgaactttaccctcacgttctctaaaccatgaaatggctttctcaacctgtttagaactagaggcaggatagttacctgaactgctacttcctgagctacttccgcctgaattttgagaagctttaccttgctcaaacaactcagctagagaaggctctccaagcaatccacctttaaactcttctgatttaccccaaaggttagagaatcgactaattcccccctcttgaagtcctcgtgttacagatagagttgtaacaaaccctgacgagtagctgtagtcatgttgaactccttcaatgtaatactcccatatttcattgttttgctcatcattatagattagtctgttacccatacggtaatttggatgacctacaactttgatttcccctgcgtagaagtttccgttctcacaataccaattcgttatcttttcagtaaagattttaagtgcctctgcattgacatcttgagcggtaggtactccatccgttgagttattagtgaatatcttctcgtactcagatttctttaactctccccctgcttctaggaaagttgaagctactgtagtcgctttatccttgtcaacacctttaaactctttcatgatagcatctctaacaaggtctctatcctgaatggttttatctttgtagtctttaaggaactttttaagcttactgtaggttatttttaagtctcctgcatcatccacattcttatcattaattcctgtaattctagtaaaatcatctatagagaagctactagtctttagatatgagtcaatgatagcgttagctttgttagtgtctattcttgaatctacagaaactatttttgaagctactgctgtctttctcactctaagagtattaacaggttgtgcttttaagtaagacaagataacagagtgcattgatttaacactagagtttgtactagttctagctgttgctgttctagcttggactgcggggctagcacttctactgttattagaagagccttcttttttgataactactttgattttctttcgtccaaaagctaaacaatcctctacagaagtcatatgaatatcaatcctgttacctttgatgtccccacctgtatctcctgcaatatagttacccataccttcgacccaaacatctgaacctaaaggaataactgaagggtctactgcgagcactttagggcgctcccgtaaatcaatacctgtagcagtcaagttacttaaacctgcctgtttgtaactgtatgcagttgcctctacctcaatttctcttccctcaggtttatctgtagtatctgtatcagaacttgaatctgagtcatcagttgagtttaacactgattgtaaatatttattctttaattctaacttagaatacccgtatttgtcaactaaggcttgataataacgaggaaatgacccgaagtctacagagtctatccctaacgggttatctacaattacgttaaatattgaagcaacttctgtatcgtttttagctactgattctgagataactgcttttgacgttattacatgtgcaggtaaattattccagtcactttcatcaaaaggagttcgtctcatgattaacttacaggtctcatcttgtgtaaaatcaaagaacacctcgttaaagggcttttcagcaatatcatctaacatttgtttcaaactaccttcatagttgataaacggtagtgggttagctaaactttcatactctgtccaactatctagtccctcatattcaaagaactcatctattgttctaccatctttaaacttataacgagtatagttcaaaaacttagataacatagagtaagctatttctgaagcattacgtgtgctgaattgaagccctgtagatgagtcatcaggcaaccaaccaacctcagataacacaacagatacttcttgaataaccccaatctcaaaatcaatcaatatcttagcaaatgattgccctgatattctgtacatcttagagttttctccatagtcagcctctaaacgaacctcgttaacaagaccaaccaaaacagtgtcatttgttactgaggtgaaggaagctgagttttttgtgtcaggtataatcttaagaataaccacatcgtttggcgctaatattctatcccaatatacatctcctgatagcacaaaagagaatactgcggagtcatcttccatagcatttttagttgtcatactaataacactttgactcattaatttatctgaaggcacatcatctttgcttgtagcatatctaatgttatattcacttgtttctgttataaatttaataccaaactcagggtatgctacgtacctattatactttctctcaggcatttctaacctcctaattatttaaaaaagagcttagggataaccctaggctctcttaagctctttcgagtaaaaatctattgcgctgttcaagccttctgtcacagcacttgctactctagtacctacttgtctagctccacttgcacttcccgcatcgttaactgtgatattcactgagttagctgtgctgaatgtttgagcttgtgctttacctttcgtatacgattcagaacctttcatgatacttgctattttcttatcccaatcagggtcagttgcgtactcatgctgtccaccattatgtctcatagactctaatgtagtttgtcctgctgaatagaagttgtctgcaatccatttggctccacccgtcaaaccgtctccatatttgaatccgttgttagggtcattatcaaaagcaccgataccgaaccagttccctgcatttttgtcaccattcttagataatgcagaagttccccatccagtctcaacggctgagtgagcaatcaagtatcttgggtcaagacctgattgttttcctgcttctaagaagtcggctcccataccacgcatagcagaaccttcaggcgctacagagtcaatccattcgtctaattctttagctgtaagtcccataactgttttacctaagtcatgtttagtaatgtcctcatttgtccatttcttaccatcacctaagtagtctagtgacccactacctgaagtaccacctgagctatcgcccccgcttcctccgttagaattaccgaatattccattttgtgctttagcctctactagtatttgttttgctctatctagtaaagtagaatagaatgataagttagcattttcatctatgatgtttttctctctaactttctcagattgatattttttattattagtgtctttttcttcttcgttcttagctttgttctcagacttcttgttcgaagctttatccttacctgcactaagtccgctttgttgaatctcagaagcttcagcagtctccccgccaaagaatccactaaccttttctttaccccaattccacattgaggagataccttttttaaccatcttatcaggagcagttattatatccatccctttagagataacatctttaccgatgttgaaggcacctttaagaccatcagtaatcttgtctttaccccaagagaacccgtctttaattgcttcagtaactccgcctagcttttctttgctccaatcaatagctccacgccctgcatttacaagaccttcacctgtcttagaacctaagaatgctccaccgataccaccgactaaacctccgattgcagtacccactacaggaacagcagacccgattgtagctcctaaggcagaacctcctgccatacctgcaagcataccaccatttctacctgtagcctttaccttgtcatcagatgttgcaatgtcagctacagcagaccctacggctaaccaaggagcaaccttacctaatgcgccccctgccttacctaagaatccacctgctttacttagaagacctcctgattcagctccgcctttaaacaatccaccaagcttactaaacatcccacctgatttacctgcttcagctccacctttaaagaatccaccaagcttactaaagagtcctgtacctgcttctgtagctgttgcactacctgcacctgtaaagatactctttccgtattccatagccttagtacctagtttggttttacctaacacatcccctgctttacttaccacagaagaaccgaattttgtcttagttagtcctttaataactgaacttaaccctgacatacctccactcattgctaacgtagcagttagtgcagttacggctgttgtcaataaatacaatggggtaggcaatccacctaagttactattgatactacgtaatacatctccgtagtcgttagtcttagatgcctgatattctgttacagcttctgacctatcggctgtaccttctttagagtttttataatcttctgcgttctgcccatatttatcagaaccaagacctttattctcctcagaaattttagctaaggtgtcatcatctaaatctttaaacccattactagattcaaaaatacctttaacctcatcaggtcttaagctagctcccattttatctgctaataaagtaaagtactccattttagcatcatcagtagccatcccaccttgttgagcgttggcataattcatcatagtttttaagttgtcagggtcagatatacctttgtcaagctgttctctaagtttaaatcttccatccatcccttgatacttagtacctttaccaaaaactaggctaagcattgggtcatctatagaatttcggataccctcgtcaagagagctcattactttagaaccattctcaccctgtagtgcacgaccacctttttcactaaacaaagtttgtaatgcgactaggttattaagctcatcgttgttaccgtttctacctgcaaatacttggctactaatactattaagagcatctagttgttctttttcacgaccaaccataccactttgctcaatagctcctaggaaggcttcttggattgctttagcttgtgttgctgaatctactgcaccacttcgcatattactttccataaaactacttaaggtttcattatctacaggaacagctctagaaccttcagctacagctcttgtagtatcatttaagctttcttgtcctttgaatcccattgatgacaaaatactatcttggaactcaagcatttctccacctttgtagttgatacctttttctagacctgcttcttgagcttgcttacgtactgctctaaaatcactatttcctgttacttgccctgcacgaatactaggctctctcatagctttgttagctgtagcacctttagagtacatacctgctagagaaccaatcagtgaacccataacagcaataccaatagagttagaacgactggctaactgacctttcattgaagttgggtcagcatccacgttgacatcattcatcttattcttagtttgcttgagagtttcatcaaacccgcctatagtactattcatctcttggaacgctttgatagtgtcctctaatactcttcttgagttttttaatgcagactcttcgtttatccgctcttggttagttttactagtgtttttagcaagttgagataactcttggtcaattgtattaatttgcttatttaagtcattaatacgtaattcattgtcctctttcattgaccctgctgtacttaatgtgtccatatctccacgaagcacgttagcttgattgaaagtagctttacctgctgaagaatatgagttagacctagacttcacacgtctctctgttgcgtttaagtctctagttaaactcttaacttctctcaagtatttaatttcatcttgcagttcactgttgtatcgttgttgctctttaacagtctctctgttaagccctgacatagattgtctattgtcccctaattgttggaacttgtttcttgtctcgtctaggtttttttgtacatttttaatttggtcatttatagcagaaataccaccaaaatcacctttgcttgcctgaactgattttaaactttgaagctgtctttctagctctttagatagtctaatcatttcctgcattgctttgacgttggtatctatatccttttgagagctgtggaagtagttatctttcccttttttgtttagcccatcaatggtatccataagttctacaattttattcagtttctcagtagcactaccaatgtcggcatctactccaaaacgatacatattttcttccaaagtttcactccctttcaaaggggctttacgcccctattttttaaatatagaaatcatcgtccctactaggtataatagtctcaggtgcaaagttttcgtctccaccctcgaatattgaaatagcctcatcaatactttcctgagtgatttttccataacctagttgttgagcttggttttcttcactgatttcaatatcagttttgtcgccccacttattaattccatctgcttcaagagctttagcttctttaatcacacggtctaagttatttttcatcatttcatttaagttatcttctgctatagttgttccaccgttggctacaatactttcagcctctacactagcatcccaacgagctcttagtttagccatatcttcaggagttgtcatagcttgaacttggttagcaatatcagcttcatcgtggtcttcacgtttagcaacaaagtcatcatgctctgctgtccaccatgaatcgtcaaagtcttggtagtctgaatccgctactccgcctcttcttgcacgttcaatctcttctctatctttctccatgctatatgcaataaactcaatctgacggtctgtcagtgccctaaaatcggggttggtgggtaacactttgaactctttcataatattccaaagtaccctaccccctgtactacgggcaactcttcgggaaccaccaatagattttaaatcaatattgaaatcggtctagccaatcggcaaaatcaactcctatcttgtaaataatattcatattatacacattttcaggttcgatttcttttggtacatcaataccacacacttgtaataaagcaaaagtatggtaaactacgtaagtaaaggtgttaaccattgtacctgtaccacctaaaaagttctcacgaactgcgttaattttaccttgttcaattgcgttaggtgctttgattttaactgtaatctttaaaccaccgtaatcttcaaaggtgtactcatgaacataaa

SEQ ID NO: 7 - DNA, 151052 bp, Unknown
  Description of Unknown: VREML237-1 complete genome sequence
taggtgaagcaaacgacttcttagtatccgaattgaagattgaattagataacaacttcattggaactaaagttgtagatacaagcgcaagcttgattaaaaacttcatccaatcattcctagataagaaaaaacgtgctcgtgaaatccaagattacacaccagaagaagtacaagttgttcttgaaggggatgtagcatctatcagcatgactgtaatgccaatccgtagcttgaacaagattactgtacaactagtgtacaaacaacaaatcttgacagcataacaggtcgggggcttttagccccctataccttactaaaaataatctaaaataggagtgaaacatagatggctagcgttggaaatcaaacagtccacacaggtaacacagtttacttgatgattggtaacaaaattatcggacgtgcacaatctgcatctggtgaacgtcaatatggtacacaaggtgtatacgaaattggtagtatcatgccacaagaacacgtatacttgaaatatgaaggtacaatcaaccttgaacgtatgcgtatgaagaaagaagacttagcaagcttaggtattactgctctaggtgaagatattcttcaacgtgacattatcgacatcgtaatgatggataacttgactaaagaaatcgttgttgcttaccgtggatgctctgctgtatcttacagtgaatcattcacagctaacgaaatcactagtgagtccactcagttcacgtacctaacatcagctaaagttaagtaagtagtgtaaaatagaccctaaaaaatggggtctatttttttttagttttggtattgacaaattatacatgtatctatataataggtattgtagttggtatacattttcgaacttaatctttcttatctttatcttacacatgacctagcaggagtgctaggtctatttttttttgctctcatagaggcaactaactagtgtgctataataagtatagaatgctatattaacttatgaaagaaataggaggaataagtaatgactgaaaaagaaaacaaggttgatttccctcagcttaacatgactcgtgaacagcttatcgaaaagattaaccgtggggaaaatctaacagacgaagaaattaatttgttaaaatatcataatgcagaagcagagcataaagaacttaaccgaattattccgggagttaacaatgtattctcaaaacattatgatttaaaagagtttggtatggaatttgatattaaaattaaagcaccaaacgtggtacaacaaggtaaaattcaagcaatgcgtgaggcttacttagaaggtatgggtatggcagtaagtaactttattttccaatgctatcatacactagctactatccgtgtttgtggtgtagaagtacctaaagagctagaaaaagatgaagacatctataacatctacgtcttaaacattatcgggaaggattttgcggagtggttaaactcctttcgctactaatctcgaaagtttagggggtataaaaaccctcgtcagaaatacatatagccgaaacatgtgggctattatgaaaaaaatttaatgtattacctagtgaccctgcatggcaaaaatctaactcatgagcaagtagaatggattttgtataacatggaaagagatgttgaagaagaacaacgcagagctaaaggtcttgctcttgaaggtgaatacgaagacttggatgcttcttggtatgatgtacctcatgaagagtttaaccctgtacgtgaaggtcatgatgaagctgagattgctcgtaagcttaatgaaatcactacagaagaggacatggctaaacttaaagctcgttgggaagctagtcaggaagtcgatgcaatccgtgccgaaggtggtacaacgattgaggaagacacaatcaatgaacttattgctaacaatgtacagaaagctattgaagaagctaaacgtattgagaaacatggtggtaataagtggggagacaaaaccccgattgaattagaggaagagcgtaagaatctagaatttaaatctcagcttaagcaagatgatattcaagatgcaattgctctgttcaatggagaaaaagatatagaaccaacatcagtagacgatgattttgtaatataggagggtagggttttaccctaccttttctttgtaaaggaagtgtggaaatggctaacaactatcggttttacgttgatgcaatgactggggatgccattgcaaaattagaagaagttaataagttgatggataaaattgactctaagagtgcaaaaggtacccagaagtttttccatacaactcaaagagaaatagacgaagcagtagccgatatgcaacgtttaattcgaatgaaaaaggaactagataagaacttcgaaaaacaaagttctatggcagaagctacaggtagcatgacagattttaaacgtgcacgtgcaaacctagaacagttacaaagtgagttccaaaaaacacaaaacgagttccaaaagttagcaagcatgaaagctaacccgaactttacgaataaaacagctttgaaagaacaaagagcttacagagaagaattgaccgagcaggaaaaagctttacaagcaatcaagaaagctcaacaagaattaaatcgagtaaactctcgtgtaaatcatagagcacaccaagctacctctacaggtagaatgacctacaatcaatctgaaagcatgaagaaggatttaggtggtgttgggctatactcagatactcaacgagaaaataaagaacgacaagctcaactaagagaccaataccgtagaagacaagaggagctatcacaagtacgttctgatacaaacttagatagacaggttcgtaagaatagagaaacatctatcttagaagaaatcaaaggtatcgaacaagagattgaagctcgtaagaaatttaatcagactttgaatgatactattgagaacttaaagtcaaaaacggaacagttaaacaatagtaacgttaaagtagaggcggataggaactccactgcgggcgttatagcttctcgtgccccatctatagccatcgcaggtttaggctctgctgtggcggcaatagggggcttatacgctaaagggagctactgcgaatgcaggtatgcgtgattcaaccatctctttaggacaacgtacaggtaacggagacttccgtgctattcgtaaagaagcccaaatgatgggtattgaaaagcaacttgggtataaaggagctgatatgcttcaattccaagaagatgcgttaagtaatatcgggtttaccaataaagaagacctaacagctaatactagagctttagcggaaggttcacgtgcagttcctgttgattctgaaaccttaagcgggtttatgaacgaccaaatgcgtagaggcgctgtgagcggtaaagaccaaattaaagcgattcaggaaggtttcttaggagctatccaaaaatctggtatggtaggtcgtgaaaaagagcagttaaatgctttgaaaacattaagtgaccaatcatttagtggacgtaacggtagtaatgaggaacttaaacaacaaatggctatgcttacactgttgaacaaaactggttctcgtgccgtccaaggtgaacagggtgccgagttaatgactagtttatcagcgggtattcaaggtagtgtttggaacaacaaggcttctttactactaggtaagggtagtcaataccaaggtttaagtggtatgtatgacttagcaggtaaacaagaagagggagctacccctgaaaatctgcaaaagattattggtagtgtacaaaaagctgttcctaatgatgaaaaaggtcagaaatatgtccttaaaagtgctatgcacgaactatttggtacaaatgcaactaatgaccaagtagatggtatcatgaaggcttacggtaatggtaatctaaatgaagaaaatatcaataagattatgaatgaaagcgaatctactggtaaagataaatacaagaagaacgcagaagattatactaactcgaaagagggtatggctaatcgttccgaagcagtaactgagaaacaagcttccggtatcaacgactatggtgatgctctacgaggaattaattctaaattaggaggaatccctccggctatgtatgctttaggtgcaggtatgggtgccctagcaactgccttgattacttcgggaactatgggtggtctctctagctttgttaagaacttgacgagagggacattctctgccggagctacaactgctacaacagccggagcaactagtgcaggtggttcattctttaaaggtgtaggacaagcctttaaatcaggtaaggctactggtggatggtcagcaggtcttaagagtgcaggtactacagctaaagacttagcaggtgctaatattgccggagctgaaactattgcaggagctacgaaagcaggttctgtagcaagtaaatttggtaaagtagcaggtaaagtagcgttacctattgccttagtcggttcagcaattgatattgcaagctccgatgacaaggtaaaatctgttggtgagaatgccggaggactagcaggtggatttgccggagctaaattaggtgctttagcaggtacagctattttaccgggtgttggtactgttatcgggggtgcattaggtgctcttggaggtagcttaatcggtaataaagccggtggtggtttagtagacggtgttcgtaagttctttggtggagaggaagcctatgcagacgaagtagatacaggtacttccgcaggtgggcaagaaacgcttaaaggacaagagaacaagtctggtaaacaagaagaacgagacatgacgaataaacgtgtcctttctgaaaaaacacgtgctgagaataacgctgaggaagcaactaatttatctatctactcaaaattacttgatagagcacaacgaatcctaaatcaagctagaaatcaaaatggtatctttggtaactccaagggtgctaacagttctagtgatagtggcggtatcggtgacgaccctgcaagtaaggattttggcggagactgggaaaaagccattcgtcaagcttctaaacaacttggggtagacgttacagaccaagatgtagacacattgcttaaattaattcaagcagagtctagtggagatgaaaaagctgtccaacaaatcattgatgagaacaactttaacggttctggtggtgccaaagggcttctacaatacatccaatctacgttcgatgcttataaagtaaatggacacgatgacatcatgagtggttatgaccaattactagcgttctttaacaatagcaactggcaaaaagacttaaatgcttggaataatcgttaccaaaatggtagtacgggttggggtccaacgggtagtaagacccatgcgatgggtggacatatcacttctccggaacatgctttgcttggtgaggtgccgggacaagatgaatatgttattaacccacatcaacctacagctcctagattactggcagaagcttctcgtaaaactgcacagaaattccgtttgtttggtaatggttctggggacgaatggtcttcccgtataggtggaattaacttatccggtggaggtagttcagcacaagcaccaacattaaacaatacaaatgacgttaaagttagcgtaaccgtacaaggtggcggaacttctgaaagtattgctaatgaaattggtaataaaacagcaagtaagattcttcaatcagccgatgatgcaatgagtttctttacaaaagaaatgaaacgagtttaagaaaactaggggactcgttccccctttatttattgaaggaggtaaactatggcggtagaattacgttatcctagatttaacctagcgttttatacagaaaaagacgaatatcatattacgtatgatgcacagacaggtgaatctaatacttctgtagtaaacaaagataatgattcggaagtttctaataactttatgatagagtccgttatcagtttaacaacaaaaaattcaatggaagatgacagtgctgtcttttcttttgttctagccggagatgtatactgggatagaattttaaaagccaatgatgcagttgtattacggctttaccccgacataaccagtgacttacctgttaacccagttttattagttgggttaatctcagaagtacgacttgaaggagactatggggagaactctaagatgtatcgtattacaggtcaatcatttgctaaggctttaatgcaatttgacctaggtgttattcaagaagttagtgttgtattaactgatattggttggttacctgatgatgcccaagagggggttaagatgacaggtagaagtgccagtcagctagcagaaggaatgatgaaccgtttcttacagtatatgaaatttgactttaacggagagggcttagagcgctttttagaatgggaattagacagttggacagaagcagagcggttgatagataataccccgtatattaactatgagggttctctaaaacaattgttagacgacatcacagctaaaccatttaatgaactgttctttgatgctacaccgggaaacaaatgtcgaatgattatgcgtagaaccccgtttgataaagcagactgggagaatttaactacgtatactgtaacatctaaagaagttatttctgagtcagtagcaacaaatgatacagaagcctactctatctttaatatttctataaataacctttatggtacagactctatgatgctcggttctaaaccacaggtattccctgctttagttaataagtacggatacaaaaaactagaggttgataacaaatacttgcagggtgcaattgtagataacagtgataatgcagatagtgcggatacaaatactgacggtgatacagaaacgaacgaagataccactacagaaagacgtacaactagaaaaaaagatacgaatgaatctagtgcattcgacacgacttacggtacagtaatgaactatctacgtggttacccattagacatcttaagagtgaaacgtggtaatgttcgagctaaaatacttcaagtagacagacgtattacaggaacaatggcagataaaatcattgaccagtatattacaacacagagcttgacaaaagaacagttcacagatataactggtattaatgaaaaaaaatgctagcaagggaaatggtaaggaaaaacctacgtataaaaaaacttgtgaagttcttggaagattacaaggatgaagcagagaacaatgagactactacaatcaagaatgaacttatgaatgagttcaaattaacagataaccaagcaacatctattgctagtgagtttgtggctaataaaagcttgcgtaaaactcaatatgacgaaatcatgaaaaacaatcctagtgatagtacaacggtatctggttctgatacaaaatacgtaaaagaatttacgaaacgtttagctaactggtactgcgaaaatcctaacttctatagtggagatattgtagttaagggtagtccagaatatcgtttaggcggacgactattcgttatagacgaacagaacaacgaattgtgggaatactatattgaatctgtagagcatactttttcttacacgcaaggatatacgacaaccctaggggtaactcgtggtcttaaaaacggaggtaaagaccgattcacacacctttgggacaagtcagaagacttctcaggaggtatgttgggtgaaaagaccttagaggctttactagaagagcaagaaaagaaaaacaatgagaacaatagtagttctggttctagtggtggttcaagcggtgttaacccatctaatattccgggtggtacagtagcaatgaaagctgtaaactggggacgttctcactccaaaacagaatcttcctttaggtctgcgtatgactggggaggtgggcgtacaggtagagacccatttgaaagttcacctattgctacagactgttcgtcatttgtatggtggtgttttaaacatgcaggtgtagaattgaatggtggagcaactgggatgactacatggagtattattgcggatacgaaacttgaaacaatagctacccgtggtcaaaagaactctgctatctttgataagatgaaggcaggagacattatctggttccgtaactgtgaacatattggaatttactgtggtgaaggaaaaatggttgcatgtaatggttcaggtaatatgaatgaaagtcctacagcaggtattattgtgtcagatatgacaagtggatactggtgggatacattcgatggagatgtaaaagatacaattaacctcgttaatagcgagggttttttgttgtaaaaaacaaaactagtatgtgtgctataatattaagtagagacacatacaagagaaaggatggtatcaacttggcaggaggacgtagatttcaggcagggttaggttccgaacataaaagattatacaaagaaggacaacaaattaatactttgttgctagcccaagttatccaagttaattataaatataatacagttgatttactagcattacagcataaagaagttttccaaaactcctatgccaatgaaggtagattttctgctcgtttaccaatggaatttggtggacgaaaccttgcaggacaaccatatggtcaagtaaaccctattgccgttggtactgttgtcctagtaggttttattaactctgataaagacatgccgattgttattagtgtatacaataacaacgatgtaaataaacaattatcccgtacacgttttgctaatgcagaccctacagatatggctttagcgggacaaatgtatcaaaaatttagtttgtacccatctttaacttacgatagtattgatggggatggtaaccgagtagttacattctctggtaaatcatttattgcattcgatacaaaagacatgcaaaactctccaatgacagatgctagttacggttctcgttatgaagacttaggaacatcttactataacgatggagaactaattgaaccgatgaaaggtcgagcacctaatgtgttgttcaagcaccaaggtattcttgacgatgataataaacccgatacacataatttcatgattcacattaacccagatggaacataccgtacatctatgatggatacggaacaagactggcggacaatgtttgagatgacaccggagggtaaaatccgtttacgtagacaaggggatactgtacgtctaaacgatggttttgaaattggtgaactaggtattaatgaagaaggtatcgtttacttacgtaatggggacatggacttagaagttcgtgaagatggtatctactcccaaggtaaactaatcacagaaaatatcaatcttgatgatatttatgaaaaattagctaatgttacttttgaaattaataagacaaatgagtccttacaaattttaactgagaaatcagagctacaagatggtaagattgtaaatctagaaacagagattacaattgtagccggaaaagtagaatctaaagtaagtgcaacagaagtacaagacatgattgatagctctattgtagacatgacggatgctattaaaaaagcccaagaagatgcagatagagcaaatcaagttatttctgatatggctagtgataatcgcttggctcctagtgagaagctagatttactaaaagagtgggacatcatcaagaatgagtacccaacttatttagcacaagctgaactatacgaagtagatagtacaacttatactgctaagtacaaagctttagaaacatttgttactcctttattggaagacatggaagctactagtgtagtagatggttctattatgcgtaaaacatttagtgcatattacacagaacgaatcaatttactaaatgcaatcactaaagggttaaaagatggtttagaagaggcaatgaagaaagcttctcaggcttctgtagatgctacacaagctttagctgattctgcacaggcacaaattgatgcaaacaatgcaaaacaattgattgcagatattgctagtgacggtaagctgactgcttctgaaaagtaccaattgaaaaagaatgggatgttattgttaaggagtatcctacaacaattgcccaagcaacaaagtacaaagtaaatacagataactatactgctaagtataaagctttagaaacatttgtcactcctttgtttgcgaatatggatgaaacaagcgtagttaacggggaacaactacgtgcagtattttctgattactatgctgtaaagattactttattaaaagaaatcacagatattgctcgtgatgaattgactgattatggtaaccgtattactgtagcagaaacaaaaatcacacaaacatccgaagctattacgttaatggcttccagagtggaaactgttgaaaatgatgttaaaacaaacacagcgcaattgaaagtacaagcagacctaattagtcagaaagtaactgctagtgaagtaaaagatgctattgataatgcaattgataacatgtctattggtggttctaacttgtttgtaatcaaaacgcaaacagcaggactattgaatgaaaataatggtactgtaggaacagccgtagataaatctgtagtatctaactatatcaaggtaacagctaaaatgccttatgtagcttctttatatggaaacatagggacaaacagtattatcattgcgtggtatgacacaagcaaaacgtttatctctggtcaagctgtagctgattctggtgatttccataaaacttacgttgcaccagaaaacgcagtatatgctcgtttaagctataaaaaagctgacactgttaaaatgaaatttgaagtaggtacgaagccaactgattacagcccgtcatgggatgatattaaaggtgaccagactgctttagaggaatacattaaacaggtagaggaacaagctaaacaagcacaacaagaagcagaaaatgctaagaatgaagcagaaaatgcaaatagtgctattgctgacatgtctaatgacaatatgttaacagcaaatgagaaacaacaaattttactgcaatgggaagaaattaaaacggaatacccaattaatttagaccaagcaactaaatttggtgtttctgctacgcaatatacaacagcgtacaatgctctaaaaatatatttagacccattattagcagacatgacgacaacttctgtaattgtcggttctactatgcgcagtacatttaatacgtactatgaccgtagaacaacattgcttaatcgtgtagctgaactagctaaacaagtagctgaccaagctaaggatacagcagacaaagtagacgatgacttaaacaacattggtgggtacaactacatcggattctcttccggagaccatatgtaccctcgcttgatgattaagaacgttggttattactatattccgtctacaacaagtgcagaatttgtagatgatatggtttgtttaaaacctaaaacagctacagctacaagtgttcaatatgacatcggtaactctaatgttagtgtggctaacgttggacttgctaactatcgaatgaaagaagttaaaacaggtcaatggctgactgcttctgcaaatttaaaagttgtgggaacaggtactgcttatctaactatttttacactggaaaatggttcatggaaagcttcatacagtgatagaattagtgcaagtcaaggcgtaacccgtgtagttgctcaaagacaagttacagatgcaactacaggtatttttagttcgagttgatggaagtaacataaccgaagttcatttcggaaatacgcagttagaagttggtatccgacctactccttggaagaaatcagatattgacattcaagaagacatcaacaacgttgcagatgacattaaagactacatcggtgctcgttcagataacctaattacaaacggttttggtgagttagggaacaatacgaacattggtggtatctttgatggtgctgataggattgtcggtaagggttctttccgtcaagacgaaggaaacaaatcactattattcagtgaacacattgttattgacaataagaaagtttataactttgattactacatgcacacactaaagggtgttggtagaagttatgctatgatttgtccttatgatgtagatggtaaacgtattacgtatccttctcttggaggacgtaattacaattctactactcctgttaaatttacgaaactggcaaaaccgcttaaagtcggggataccgaagtttatgtagaagatgtgagtctatggaatggtcaagcaccacaagactatcaacgtagtattatcatgtggggttataaaaactcatttggttatacttaccccgatggaacatacagtcagctaatgcaaatgaagacgtatgatattggtgcagttgatactacagctaacaagattacattaaacaaaccgtgggcagtaactaaccctaatagttcagatggaatcttccctgtaggacatacacttagcccaacctctgacggttctacgtatctatatcttaacggtcatgtaaatattcaagtaccgactacgtacacaagatatagtcatttgattagtggttcttctgagtttgctaacacaacgcttatcccagtagaaacaggttctatccaacttggattcctattgaatagggatacaactggtgaaaaatcttggctaaacggtttacgtctacgtgattatacagatacgtataagctaaacgatgacgttagagaaacacaagaaaatgtggataaagcccaagcagatgcagataaagctaaccagtcaattgctgatttatccaatgataatttagttactcctaacgagaaactagatttgaaaaaagagtgggaaattattgttgctgaaaaacctaagaatgatgctcaggcagataaattcggagtaagtaaagtagcttacggtactgcgtatactgctctagatacgtatttaaaacccatcttagcaagcacaacaacgaactctgcgattgttggacaaactatgcgggatacgtttaaggcgtattacacggctcgtacagacctgttaaacgctattgcatctaaagctaaggaattggctgataatgcacaagataccgcagataatatagctgtcggtactcgtaaccttttaatcggaacacaggacttttccaaaggtaaatatccgggtaatgctaacgttaccattacagatgaaaagctgtttggaaatgcagtaatgaagaacgattacactacaggtaccggatattcagatatgtaccaaatgacgacctcaattattccaacaggaactcagtatacactatcgttttatgcaaaggcagacctagaaggaactaaaatgtcttgttacttctacaacccaaatactacgacaagtagtgtaaacagtcaaggtggcaaacttagttctagtgacggtcgtactgtatttgttttaagtgcagaatggactaaatactgggtaacttggacacagacacaggcagacaagcctaagtcagtaattattggtcgtaagactggtggggaggaacctaactctgctttctatatgtcttctcctatgatggtagaggggaacaaaccacaaacgtggatgaaagccccagaagacattgaaacagctataaacggtaaagaaggtgcttgggtttactccccaacagcaccaacaaatccggctgttggtttagtctgggtagactcttctaaaactccgaaccaaccaaaacgttgggttggtggagaaactggatgggttgccttaaccccagaagaagtaaaagatttaccttggggtgaagatggttctagtcttgctgactgggtagcacaagcagagcaaaagatttcttctgatgcaatcattagtactgtactaggttctgaggactttaccggtatttttgactccaaagcaaatacagaagacttaaataaccttgcttcttacgatgacttagatgctatgcaagctgagtatgaacgtctgttaaaagaagggattgcaggaattgacttctcaccatatgtaactaacacagagctagaacaattgaaagatagcttcactttctctgttcaacaagccggtggggttaatatgttgaaaaactctctaggattctctgggacagacttctggcaagcctcttctggtatagatactactcagaatgaacagttgtctaaattaggatttggttccggatttatgataaaccgagttcaaaatgcaacactagctcagacaatcgaattaccagaagcaaaacaaggtttgcagtatgctttatccttctacatgaacgtagctacttttggagatgtcactgatttccaatgtggggcacatatctacgaagaaggtgtgttgaagtatactgttggggtaacagatgctacacaagaaatcccaagtgactatcacttgtataaacttgtatttgaaccagagtctccgaatactgtcattgaattatttgttacaaatggtgcacaggcaactgtaatcatttcaggggttatgtacaatattggtaacattgcgttgaaatggcaaccatacccaagtgaaatctataacacgaacgttaagattgatattaatggtattactgttaaaaacaatcagacagatggttatacaatgattactccgcaagagttttcaggttacgcaagggttaacggggagatggaacgcatctttaccctaaatggtcaggtaacagaggttaagatgttacaagcagagaagcgtattacaatggaacctatttccgtgtttgcgatgaactctaaagaaaccaatacaattggttgggcgtttgttgcttccggagaggttgcacattctgccatagcatctagtacacaatagaaagagggagccttatctgtaaggctctcttttgttgtgttgtgctataattatattatgagaaacaaaacaagaggtgagaaaataaatggctttaagcggtagtacatacacagcttttgcacggcataggcttgtgttagaatggagagcctcccagaatgttgcgggcaactactctgatgtaagtatttggttatacttgcagtctatggattcctatggtgctttatatgctcctgctgttggacaagcacaggtaacagctaatggagttaagcaaaccgaaaatgcaacatcacaattgaatgcttatcagaaaaaactattgctagccaaagtttggcgtgtaaaccataacgcagatggtagcaagtctttttctatatctgctagttactttgtaaacgtaacctattcaggtgtttactacggaacaatctcgataccgtcattctcggtttcattaaataaaattccacgtaaaagttcgttaaaccctgtgccagatttaaatattcctaataaactaggggtaagtattacccgacaaagttctagttttacacataatttaactgtttgggtagccaatagaacaaaccctacattagataatgactcccattgggtgtatttaaacagtattgagaacgtaggtacaagtggtacattcacatttagtgtagcaaacttcacagaaatgttcaagaggatgggtacaagtaccgaatgggtaggcaaggtgaagctctggacgaatggtttaagcgagtcagtgccgagccaacaacgaaccttccgaataaaacctccaatgaacgcacaggcttctgggggtaagttaaaagtaaaagcaggagaaaagattactgttagtctaagtaacttccaatctgacggtaactttaaatatacaggtgtttttgattatcgaggggtatccataccagtagcaacaaatgtacatgcaaactctatgactcttacattaacccaagcaaacgtggattctatcttgaaagaatctccggatgatgcaggaacatgggggcaagtacgagtaacaagttactacaatggtgtacaatatcgaactccttggactggacagcatattgattgtaccattcctaaagaagattacctacctgtaataaacggaacaccgacttatactgacttaagtgccgaagctactaacgttaccggaagtaaccaagtagcattacaaagtaagtctaatatccgtgtgactattccggctaactttgccacaggtcaaggattctcaacaattaaaaccgtgcaagcttcattaggtggggctacaaaaactgctaactataatgcttctggttttaacattgatattggtgctccaaatgaaggtactgcttcttcattagttgttactgttctagacggtcgaggatttagtacatcttggacaaaaacagttcaagtatatccatatagcaatccagatgttaactatacgattgcccgtagaaacaactttgaagtagatacagaattagctgtttcaagtagttgggcgcctgttactatcggtggcgtaaacaaaaatgcaattacgtcagtaacctacgcaactaaacgttcaggtacaagtacatggggagaagaaacaccagtaactttctccacagatggggctaaagttattgtcccaacaaccgttgttcagttacctaatgagtacagttggaatttcagactaactatcaaagataagtttggtagcttctctaaagaagcaaatatttctgccggaaaacctattatgtttattgatgctgttcgtgaatctgtaggttttggtaacctgacaggtacaggggaaaatagaaaccttaatggtgtaattgaaattgaggcggaacgctaccatactacaggtaaaactggtatccaaatgaataacagtgatatttctggtttgaatggaatatatttctcaaatgacgtaatggataacgatggtgaaggattgcattttatcaagtcagggaaagacgttaactcttccaataaaaaagactacgattatatgtatatgagagacggcggattctatgttaaccatgatggtactccaatctttaaagttactgataacggtcgtatgtattatcctgcctctcatttgtggtctggtggttggtatatgtctggtacacaaaatataaccccatcgaaaccaatgtcagagtgtagaaatggatgggtactcatgtgggctaagtatcaaaatagcacacagacatggaatgatgttgtacaggtatatttaggtaaggacttagtaacaacacatagtggactaggtgtaagattactatttggtggttatggtaacgttgttatccataaatatttaacgattactgatacagaggttagaggtaatgcttcaaacaccaatgctagtttaaacgctgacagagctatttttagttcgtgttcacgaatggtaaacgaggtggaaacgatgaaaatatacgtagcagttgacgaatataacgtattgactggatggagtagtagttacgaagaaaatctaattgagacagagattgacgaaaatcacccacttattgtctctaatgattttttttggtaattataaactcatagacggtaaattagttaaagatacatctattgaattgttaaatttaaaagacatgttaaaggtagaattagaccaacaatgctcagaagctattattagcggttttaactacccgttaacggatacagaaacacttcacgtctcttattcacgaaataaacaacaatactttgaagagattaagtctcttttcgaacgtaaaattgttactcgtattaactgggagtttactactgatgatggagctactattactaaagagctaaatgaaatagaatttttaaccttgtacacttttgctagtttggttaaaacagcaaaaatgactaagcttaaagaaaaactatatccactagttgataaacaaacaaataaagaagacctgttgagtattacatgggattctattcctgatgaaccattaccagaaaaacctgttattgatttaaatggtgatggtgaaataagtcaagaagagttcgatgctttggttaaggaaaacaaagaactaaagcaaaaagtagagtttaacgaattggctttaatggatgcaattaacatgctatcgagcatgattacaggttaattttaaggaggtgataacatgtatccacacttagcaatgctctatgcaacgtatgtcatgaaagaccctaaaacatggacgatggacaaagttcctgctatgattcgagaagatgtacaaagaattgtagatgaaatgacaaaaaaagaacaagcacccgagtagtctttctaacactaggggtttccattggtttagtcgcaggactagctattgggttcttcctataatgctcggggagaggaagagggtggcttaggctgtcctcttttttcttagttaattgtactatattaatggacgaaaggacgtgataagtgtgggacaatcagatggaatgggtggaacattaaaaagaattgctattcaagttggagacgacccaaacacaggttggtatagatttcaagttaacccaactcaatataaatacagcaaaccacaccgtgtaacaatctttaaaacaaagtctaacattatcactgaggactttggtaaagatattgagaccattcaattctccggtacaactggatttagaaaagactctagaggaatgaacggtgctgatagattaagagaactatctaatttgatagatgattatgcaaatcaaggcggtaatggtaaccgaccgaaagtagaaatgaagttctataattttactgatgaccaatattttgtggttcatttagccccagaaggtctcactatagaacgttctgcggaacagccattactatttacttatacattaagcttagttgtattaagaaaagcgggagagcctgctgaacgtgaccaagtaaacccagaaattgggaacaaaaatccaagtgtaggagacaaggataaagaaacaagaagtggcataattcaaactcctgcacaaatactacatgaacagtataaaaattctgtgttgccaaatatagcagtaaaccctagtggtacatcaggtgcctataactacggtttagttgaactaaaaagattaattggttacggaggtggtcagtaatggcaactgtatatcaatctgcggacttgcttagattctttcgttacttaaatgtaaacgtgcaaggagatgtcgttagtaatgtcatagacgaccaacctaactttatttctagattttacacaccgcacacaagagtgaataaaatatctaataccttattggatattgtgaaagacaataacattagtgaaacaaacaaagagttatccaaggattcactaacctataagttcttgaagagtggactacgattaacagctcctgacatttaccagttagctcaaatcgtagtacttgaatcttttgctttgatttatgcaattgaagaaaaacctgaaatgttcaaaatgattaatgaatcagatgtgaaacaaacacgggagaacgtaaaatatcttgtagactacttaggggagaaaaaagattatactgatattgtaatggatttacattctatggatattgcccttggttacatccaagaacagattccattaattcaaggagggttaccagtaaatggcacgatataaaaaacatacaatcgtttatggagaaaccatgcaatctattgctcaaatggaaacaggttcagtaaacgactggataaaaattgctgagtataactccttggtttatccatacatagtagatactatgcaggagaaaatggctaatattgaacatttagcaacaccgggggatactttggtaattcctgtcgaagctaacctactagacatggacgtaagtaatctaaatcaaagagacatggattttctattaagtttatctctaggtcgtgatttagacatgacaagtgagacagaatactatgaaaatcatggtacaagtgatgaagtgttctcattaacccataatgggcacggagaccttaagacggctaatggagcagataatataaggcaagcaactatctctcgtctaatgaccgctaaggggtctttaatgctacatccagaatatggtagcaacctacacctactttttggtaaaacaactattgaacaaatgaaattgattagcttagaagtatgtgaaactgtattaaaagacactcgggtagctgagtgtgtattggttagtcattatatcgaagaagaccattatgtaggaaactaccgagcaaccatacaatcaacaaaagaccagttcgagtttgtagtacaaaatgatagtgtgggcgcaattgttatagaatagaaaggagtatccctgtgagactaaagaagatttcagaaattttaggtaggctaattgacgtaaccatgattaatactcatgagttaaacgacttctctgtagggtctacaatccgttccatttacgaagctgtatcaatggaacttgaacaatactacatcttaggaagagaaaatattttatggggtatcgaacagggggtactcaatgcttttgattttagaaaacgtgaagctaaacgggcttatggtatggttaccctagaatttcataccgtaacgcaaacccctgtttatgtgccgacaggtacgacctttgactctagcttgtctggtgcacctagtaacttgacatttcaaaccatgcaagactatgtgattcctgccggagttgttactgctaaagtagaggtttactgtacaacagttggttcccaaggtaacattgccaaaggaagaataaatcgggttattaacaacatctctaacctgaaaaaagtgtataatgaatatgacatacttacaggtactgacgaagaaagtatcgaatctgtaaagaaacgtttccatgctttcgtagaatctcgtggtagagctacaatcaaagcattagattatggtacacgacaagtcgaagaagtatctggtgtgtatatcaaagaggaagttggctatgtacgtatttacgctcatgacttaaacggagatttgaaagacgaaacattagctaagattaaaacagctattgaagattatcgtcctgcgggaattaaattagacgtgttccctgtagtcaaattaacagtaccgattgacgtaacaatcacaattagtaataaaaacagaattaacactgcattagaagaacgaatcgaattaactattagaaactacctaaacagtcgtacagtatcagaaacattggtaaaagctgatttacttcaagctatcatgaatattgatgacaacttaatctatgactgtgaaattaataatctgagtggtaacttggatattagagacgaggagattattcgtgcaggagacgtaacgatagaattaatctaggaggtaacattgtgagtaattttttcagaaatatacacccactcttgcgaagaagtaaacgtccggagaagtatgatgatacgaacttcgctgtgttgaatgcgttaaattacgaattaacacaggcagagcaagaaaccattgctagtaaaatacaatcctccttagagtctgctacagatacgtacctagacacttggggagattggttcggggtgtaccgtaaggacggttgggatgatgaatattatcgtgcacgtatcatacgggaactacttcttaagcgtggtacaattcctgctatcattgatgcgttattggatttccttaacgacaatgatgcagtcatccaaatctacgaaccttggagaaacattttctatacaaataaatcaaaattaaacggtgacgaccatttaatgggttactactatcgttttgcaattattgatatttcaattgatagaccgtttcctcctgaaattgtagagattattaaggctttcaaacctgcgggagttttattctatctaagattagacacaagtttaaataagagtaaaacaactgtagaaagtccatatgtatatctagacgtgacgaataagacagaattagagttccttaatggtttatattatgacctacgaggtaatattaacctgtctgaccaacgtacacaagttgtagagaacaatatcttccatacgaataactctatgttaaacggtgaagatgtacttgcaggagcatttgaccacggaagaggttacattcacttagcaagtacaacattgcttgattacacaccaaaacctactgactctatgagtgacttaaaaacagctctaggagaatcaggtgctgacatgtataatcaaacaaaagaaaaggatggaagaacagcttctattcaagtacctgcaacaaggaatgtccataccctatactcaaatagtatagattttggtgactatgactatagcggaaaccctaatgtagctgtaaccgatgcagatacgttcaaattaggaacaggtggaactcttacctataataatggggagtatactgttttgatggatggaacagctagattaagtaggtataatacagatggtaaaaacagtgtatatttagaagatagggtaacctatacaatttcttgtgaaatgtatgttggttctgattataccggaaatgttgaccagatatttgctaactatgcgtatcttgatggtgggtatactgtactgcaaacatcaaggctatctgcaaatgctcctagagatacttggataacagtaagaggaacatctactatgaattatcaagggagagtacctaaagtattatactttacttggcaaacagttgctagtgatgttaaccctactggtacacttaaaatgcgaaatatgaaaattgagcgtggagaaattaatactccttaccaacctaatttattagtagagccattccaattatctaatgttcctttaaatgataatttaggagacccaaacgtatctttcccaattaacacacaaaattcctacttagtatatgatggcaccataaaagaaaattggcaagctaacacggtgtataccttaacattaaagggtaagaaattaaatacacagagttggaaaccgtatattgatactaaaaatacttccacgcttagtaaacccccttttaactcctgtggaggggttaccgaatgtttggcgcagtacatttatggtctcccaaaatgatatagacaccggacgggttcaaaaacagttaagtatctaccaagcacctagtgcaacaaggggtacagcttcaattgaatgggtgaaacttgaaaaaggtgctattgctacaccacctatcgaacagtatgcctacacaggtactcttgtttcaggtacatcttctaaaaaaccctaaagattatacatggggaagtttatctcctgttttaggtaagaaagcatatatggtgtttgatattaagacatttatcgaagaaaattatgctatagaatttgaaaaacttattactgacctaggagaagaccaagcattaaatactgtgtttgaaaactttaacatctccacagcgcttaaggctttagtaagtccaagttcaccaattaatttttcgattgaactatacgatttttctacaagtgcatggcacaagttaaacacggatagtttagacttacgtatgcgtacgttcaacttagtagcgaatcgtattacagactatttaaacgactacaagctgttatttgttcgttacgtttttgataacgaaacagataaagatgtgacagttgaacttgacatgctaaatgtactatttaattatcgtttaggtgacggatacagcttagggctacaaagtactgtggaatgcctaagtgaaatacctcttaaagggctgactctttctagtgaaagtgttgaagttgctattggtgaaacagcgaaagttactgctactcctgttcctgccaatgcaactaacaaaagtttagaatgggaaatagcagaccctaagattgctactgtagatacttctggtagtattacaggagtagctattggggaaaccacattaaccgtgtacggtgaagacaaaaccattagtgctacttgcagtgtgtctgtaaaagctagacataccctatactcaaacagcaccgacttcggtgattatgattatagtggaaatcctaacttgctaagcaatgtaaccaatgatagttggacggctgagggtgctatgaaggtgaccgcagtagatgattacctagagttagtaaaagatactgctggacgttttggtactgcaaagatttataatataccagcattgcgctcagactcacaatatactacttctttagaattttatcttaagtcaggcacctctgttgaggatttaaaaaaatgtaatattgctatcgaagcaactaatacaagtgggcaagtttattatagtgttatttatatgaataatataccgaagatggatgaatgggttgatttaacaagtacttttactacaaacacctatacagataatcttaccgactggaagtttagggtgtatgtccatccagatgtttccgcttctatgagaattagaaatagcattaagattgaaaaaggttcgacggctacagcatatcaacctaacttacttgatgacccttactggttgggtaaagttcctttgggtgagaatattgctaataaagatattcagttcccaatcaaaaccaatgaatatctcgcatatattgctagaatgatagaaccttttattgtaggagaaacttatacaatcaccataaaagcaacaaaacccgctagtcaaacatttatggtttataacagtggggaaggaactacttactatggaaacctaaaaccagttgagggattgacaaacgtatggtctctaacatttacaccaaataatgtttcgtcaagtaatcctagcgatttacgtatttttcaatatccatcatcaactaaaggcgatgttcaaattgactggttaaaaatcgaaaaaggtgacactagaactcctaacattgattcctatgcttatcgtggtacagttttaactacatccgaagaatcaccaaaagaccctaatgcgtatacatggtctagtatctaaataggaatagcagaataatatgctataatataaatagggcacgatgctgtgccctatttttttaattgaatgctatattatctaatgaaaccatagaagaaaagaggttataaagtggctattgcaactaataattcccgagtgtatgcttcattacaacttaaaaataaaaaagatagcatgtacttagttatcggtaaaacctcaccttggacaaatgaagatgccccacctgctacagaccctaatacttcaacattacaagaagttgttggttacaaaaaagtaagtaaagcatctctatgtcgtgaatacgttgcagatgacgagaacaagtacccagtgattagctacggtactcgtaaatttactttaataccagatgaggatgcttataaagaaaaagcatggatggtatatatcgaatctgaaatcgtgggtgacgaattgcctttaggtacatttagacaagtagggcttcacactgacctagtaccaaaaacaggtgtggacaaagatgcgttactacctacagaagtaacaaacgcaggtatcctacaattctttgaaaacagacaacaacaaaacagaactgccgatgtaacattgagagaaaaatttatcgttacaatggaaaacggcaaaacattaaaagcgtaagaaaggacgataagcattggcaaaagaaattacaaatgatgatttaaagaaagcgccctaccttgaccgctttgaccctaataagaatagaacacgagtgctattcaaaccggataaacctctccaacaagcagaacttaatgaactacaagcgatgcaagattatgcgttatccaatgtagcagagtccgtgttcagtgacggggacattcaaacaggtatggaatttattcttcaaggaacaacgcttactgttaaaaaggtaaagtgttccttggtggtaaaatgcgtaactttaatgaacaaagtattgaaatcacaggtacaggtactgagtacattggtgttaaacttgttcaaaaagtaattaccgcagaagacgacccaaccttgttagaccaaacaagtggcgttcctagtcatttctcagaaggtgcagaccgtttagaagaaacagttgtactaggagtaaacgatgatgaagcttcaaatatctatcgttttgaaaatggtcagttatacattaacccagatacaccagaaatggataaaatcaataaagtactagcagaacgtactttcgatgaatctggttcttatcgtgtacgtggatttgacatgtatacggaagcacatccaacagaccctaataacaaaattcaactagttattgactctggacgtgcatatgtattaggttttaaagtagacaaacctacaactactcgtattgatattgataagtctcgtgacttagaaacaatcaataacgaaggtttctactacagtaacgaaactcgtttgaataaattaggtaactcacctgtatctagcgtagaccgtgtaacagcccaagtggaagttgcaaaagaacaagtgtctcgtggagttgttggtgggggtactgattaccttaaaaatacttcggtaacaaaagttgttcgtgtatggacagaaggttccggagcatacgaatacaaacagggagaagacttccagttagttaatggtcaagctatctcatgggcacctacagggcaagaaccacctgccggaggtacttactttgtacaatacgtttacaacaaaacaatgattgaaaacactgattataaggtaactgttaaaggtgaaggagataaccgtgagtggtatatcgactttaacgaaatgacaggttctaaaccagtagacgaatcattagttaacgtagattacaaatacttcttagctcgtaaagacttaattgtgttagaccataacggaaactttactgttcataaaggacaacctaacgcaatgcgtttagtagattcccctaaccatattgacccattggtactgaacattggtacagttcttgtttacccagattcaagtacagcagaagctaatcaatggacaatcactcggttaacgatggaagagctacaaaagttatctgtacgtgtagataacatggagtataaccaagcagtgttctacctagaccaacctgcgatggcaggagaaaacccaatctatttacgtggggtattctcagatgcgtttatctctcttgataaatacgatacaagtcatccagatgctacaattgcctttgactttgatacagcagaaatcacactgccttatgcagagattaataaaactgtaccatccattatagaaggttctagtgaagcacatgtatggggacggttagtaactgcaccatttaccgaagaagtcggaattagacaaccatttgctacagaagcaatgaatgttaacccatacaatacgttcaacaaacaaggtgttctaacactaaaccctagtgcagataactggattgaagaagaacgtatcactatcaccaaagaagaaacatctacaatgactattcgtcaatggtggagacatggtggagcttcttggacaaatgacgaaatgaaccttgtgtctaacgtagacttagataacggtatgagttggaacgacttaaaagacgactaccgtaactctggtttatctggtacaactttgtctagtggtggacaacaaacaaaagagtctatgattgagttcatgagacaaattgatgttgaaatctacgctgaaaatttagagccaaatgcaaacaacttagttgtattatttgatggcttacgtgttcctgttacaccatcctctggttaccgtaaaggttcacaagagggtactggtatggcaaatgctgacggtacgttcaaaggtgtattcaagattcctgcgggtgtacgctgtggtactcgtgaagtatctatccgaaacgatacgaacttagcaagtacaacgtttactgcacaaggaacaatgaaaactactgaggacatcatcatccgtacccacgtaacaatcaacctagttgacccattagcacaatcattcagcttcaatacaaaccgtattgctacaagcttcgatgtgttcttcgcttctaaggatagcagtacaaacattatctgtcaagtacgtggtatctcagaaggcggtcaaccaaacaaaacggtttatgcagaacgtgtattaaaaccttctgaaatcaaagtgtctgacgacgctagtgtagcaactaagattacatttgatgacccattgatgtgtaaagcaggtcaagaatactgcttagtattcattactgactctgataaatacacaatgtggattgctacaatgggacaaaacagaattgatgacccaacgcaaagcgtgaactctaacccttacttagagggtgtgctttacagttcatctaatgcgagtgcatggtctattcaccaaatgtctgatttgaaatttactgtgtatacagctaaattcaatgaagaagctgttctagagtttgacgtaatgaaaaacattaacgtagaccgtgtggttcttatgtccacatacttaactcctgcgaatacaggatgtaaatgggacatgaagattgttcttgacaacgagcctgccggaactactgttaatgacaaaccgtgggttccaattgcgaactacgtagacttagatgttaaccagattgctcgtgaggttaaacttcgtgcaacatttaaagcaaatcaatatatctctccaatgcttgcattagatgatattatgtttgccggattcttaactgctctgaaaggtagttatgttgctcgtacaattgacttaacagaagcaccgtataacactattaaaatgtcttatgaacagtttactcctgccggaactactgttgttgcaaaatacagtactgacgaaggtaaaacatggaagacatttacaacacaacctacaacaacacaacgcacacaagatttcgttcgtgtggactatgttgaaaaggttaatacgggtggaacatttaaatccattaagttccgtcttgacatgactacacaaaatagtttcttaagacctcgtgtccgcagactaatgtgtaacatgactgacaaatagtcaaccaagttgaatagcctctatatgctatactaggcatataggggttattttttatgtaaaggagacttattgatatgccagaatcatttagacaaaaatcatcaggagctttaatttttagacctacagtttctgagaaaatccattctaaccagatgaaagctcttgctaaagataaagagaaattgaacagagacatacaagaggttaataatttaaaacaagaattgactaaggaattagaagaaattagacaattaaaaaacaagttaaaaggataaaatgtcctattttaaattttttacctccttatatatttaatattatatatttaactatttatctaagttataagtatttatatattatatatttatatataagggaaccaaaaatggaaaataggacattgacatacacttacagtactggtacaatagtattgtaaggtgtgagacattattaggaggacttatgagactagtaatagatgtaatgcacactcagattagatttgatgaaaacgaaggtagtcttcgtagcactatacatagagtaatgcacgaagaacttggagtaaaagcagacggctatcaatttagtcctgcatataaatcaggttactgggatggtattattgatttttataataaagacaacgatacatttcctacaggtctagtacctaaagtagaggaaatcctaggaagactacaaactgctatgggtagtagaggttacatgtttcaatttgagattattgatgacagacctgacaaattcatggaagttgaagaaatggactcagaaattaaattgaatggtgacaatggagaaataattactctacgtgactatcaatatgattctgtaaaaagtattattgagaagcaaacaggtattatcaatgttgctactaatggtggtaaaacagagattgcttctggtttaatacagcaaatcctacctgctttagaatcaggagaaagaattgcattcttcacaaacagctcctctatcttcactcaatctatcgaccgtattgaaaaacgattaggcattaaagtaggtgcctttggagcaggtaaaaaggatattcaacaagttacatttgtgatgattccaacaattacctctgctatttcagcagacccagaagctaaacttaaacttacaccgaaagagcgtatgtacaaaaagttagctaaagagattgctcctaagttccttacaggatttaatcaaaaggactacttgaaggttacatccgtaacttccaagtgaaaacaaaagctgacttacagttgaaacatgaattggaagaggcttactacagttgtggaactaacaaacaggtagtaatgaaaatgcgtagctatcaagctgagtatgaaaaggtagtcgagaaaaagaacggtaaggtcttgaagaaatacaatgaagcaaaagagtttttagaatctgttgctgttatgattgtagatgaggcacaccatactagttctgatacttggtaccaagcactaactgcttgttctaatgctcagtatcgtatggctttaacaggttctatcgacatgaaaaaccatgtgttatggcaaagaatgcaagccatttttggttccattactaccaaggtttcgaatgacaccttaatcagtttaggtcactctgcaaaacccaaaattaccattttcccaattattgcccctacagacatcgaaaactccaattacatggatgcttacaagatggggatagtggacaatgtatacagaaattctttgattgctaaacttacaaagaaaatgtatgagagtggcagtggtgtactggtaattattaatcgtattgaacacggggaaacgattagtgagttattagatgcagaaggtgtaccacattacttcattcacggggagcttgataatgacttacgtgatgaaaagttacaagaaatgcgtgacggacatttgaaggtgatgatttcctcaacaattattgatgagggggttgacatctccggtattgataccttaatattaggtgcaggtggtaagtccttacgtcaaaccttgcaacgggtaggtcgtggcttacgtaagaaaaagacaggtgaaaacaaggtatctgtttttgatttttacgacttgacaaataaacacttgaagaaacattcggaagagagaagaaaaatctatgagaaagaacaatttgagattgttgacatccctcttccaacgaaataaacgaggaggtacaagatgacaagtcaatgcttaacaaatgaaattcgagcacaatatagtctaggcaacggaattgttgagttcgttgaaagattagctaaaaaagcacagcaatggggagaaacatttgctacccctatacgtaaaacaactgtagctgaggagatgggacgtgacacacgtactgttactcggtatctaggacaacttgaagagttgggtcttgttagtacagaagcaaaacgtggtagaaatggaggaactgttgtcgtgtttaatactgatattttaaattttgaaccaactgataacccgattacttcggagacaaaggaagctaaggagattcgtgaacgtgtctttccaaaagcaccaactccgaaacctaaaagacggtaccgtacaaaattagagattgcagaagctcgcattttagaacaaaagcaaaaaagctttgaagaacgcttaaacgacttacttgaacgtaccttcttggatagagactttttgataatttcgaagaacctcgtttgtatttccaagggtatttaattgcacaaatgtacaatgcttatgcagttattttcccaaagaatagacacgagttctttaaagatattgatgtgaaaaaatcagaggaaggtttacgtagtatgaacaaagctaaatcatacaacgtgttacctgctcgttttgtaggaaccccacagtacaacaaatttgttgaagtagctagatactgtaatgaaaataatattaacccattatcttatctaactgttcaatttgagcgtgcagagcatttagccgacattggtaaagctcgtgtaggggctattccttatgtaaacactttactgtgtgaagaagctcgtaaagcttattctgacaatgtaatgttttatcgtaaaatgcgtaatagctttaacttattcggtatgagtagtagttctgttccgtataaaggggctaaatatgagattattgtagctctacgtactgcgtacgaattagatagaacaacaagagatacgttcaactacttattagatgaattagctagtggtgcacaacaatcagtgaaacaagcaaccttgttaggttattacaacactactttaaatgctttatcagaaagtgagttagtagacgaagaccaacaattaatcagagatttcctgaaagagcaagtattgctatattcacgtaagaactcattgagcagtactatctatgctttagctttcccattacaaattaacgctgttaattcagttgcgaccctaaaaggtcttgacaaagagatgtattacacttatattggtaacatgtacaaggttacagatgttaacgatgatgaatataatagtttcacggaacgtggtcgaacaattgatttctcttacaatgctaacgatactttctttagcacaatgcgattaattgcagattgtaagggtctaggagttccggcaggtaagctaggaagtgccttacaaaaattcggtgaagaaaaagttccgttagatacttttggtatgttagatattgaacgtatctatgataaattgattgattcagatgagttagccaaagaccgatatattcaagacaaagatgcaaccatgatgagtatggttgtgactgacgaggggtagggagaaaagcagaatgagtcaaattcacaaacaaaccatttataaagccattagtgaacctttgttcgcaaaggatgtttttagtcgattaccaattgaagattttaaagaggatggatacgacatgattgtatccaccttaaatctttattatcgtacacatgatgctccactagaggaacaaacgttgttaactcttgtggaagacaaaatgttgaagcaaaataaaagtttagaagcacagcaagttgcttttaacttagtaagtgacctttataaattagaggaagcagaaacagattcggaagcaattagtgaaagtgttcagaactatgtacgtaagactttaacacgtgaagctatcatggaagctgtaacgaatgatggcgcattaggttctgaccaaaacattcagagacttatggagtctttgcgtggaatcatgacaattgacacaggcggacatggagcagaacttttagatttctttgctgatattgataagaaaaaagaacatctacgtaatttacaacaaaacaaatatccaacaggtttcatggctattgatgctatctctgatggtggtttagcccgtggtgaggttggtatggttattgcacctacaggtggtggtaaaactacttgggcagtaaaccaagctagaaattatgttgtacgaggtttaaatgtattgtacattcctctggaagaaaaaaattgaccgtatgattgttcgttttgagcaacttttatctcaacaaagtaagaacagtatcctagttgatggggagttaaacgaacagttatatgaccaaattcaacaagcttacggtgcaggtaaagaacaattaaactgggggaacttatggattcgtaaatacaaaccccaagagctaactcctagtgggctatctcaattgatttctgacgtaatgattcgtaaagggcaacaaattgacgtagttattattgactaccctgatttgatgaagaatccccattcaagtggtggtaatggagagtcagatgcgggcggtaaattatatgaagatattcgttccattgcccaagaatatgattttgtttgttggactctatctcagttgaaccgtgctagttatggtcaagaagtgaagaatgccggagcaattgagggttcaaaacgtaaaatgaatgcggtagaattaatcttcacacttaaccaaacaccagaagagttccaaagtgggtttattcgtgcttacgtagacaagttacgtaataacagtggtgtagcttatgataaaatgttgtactttaaagttattccggaaacaatgacaattcgtgatgagacccaagaagaacgaatggctcatgcgaacttgttagaacaaacaatggaagtagctagggataactacaagaaggaaaacaattttacaccaaaggatgcccaaagtaaaattaacagtttaaacgcacagctagcgggaggtctaaaataatgaaacacattattaacttttctgattttcatatgcacttttttaaggacttctctaagccagatgctatttatgggactgaccgagcaaaagaacaaataaaggttcttgaagaattaatgaattacgctcgtgaggttaaaggagacgttttatttaatggagacctgtttcataaacgggtttctattgatgtcagaatattcaatatgatgttcgaggtatttagttcatatccagatgtaccaatcgttatggttagtggtaaccacgataaagtaacgaacgctctagcctctgacagcgccttagaagcgtttaatgctttacccaatgtaactgtcatctctacaatggaaaagcttgtacgggacgaatacacgctttatggagtaagctacggtgaagaagtagacgaaatgaaggaatggattgcagaggaagctaaaaaactagaccctaacacaatcaatattctttgtgctcatatcggtgttgacggttcttctactggacagtattcccatacacttagtggagcattcaaagtagctgacttgtatcctgataattttgatattgttacgcttggtcactatcataaacgacaattcttaggtgggctatctaatgtattttatgtaggtaacaccttacagacttcttttgctgatgaaggtcaagctaaaggctttatggatattaccttagatggtaaagaatggagtatggaatttgtcaaagcaaactataccccatttatgactgtaacagcagatacagtaccagaagatttaagcggagcatttattcagtttgttggtaacgttactgaaaccgaagctgttaaaaagctcaaagaagataacgacctatcaaatctacgtatcaaggtacagaaagactattatgtacctccacgtattgagattacagcaggttctaccccagaagaagttgtacgagcatttactgataagaaataccctgatttacaggataaggctttagaatgtttacgtatagctacggaggtgtagaattgaaaacaaccttagaacgtaatagacaagagcatattgattatatactcaatgtaaacaaagaagttggtattatgcaagatgacccattcgttttatcttatttaaactctatttctctagacgaattatacgaattgagtgaacttgctgaacaaatgtataaagaatacaccgaagttagactcttagataaggcacttaaagagatagaagaaattggtgtaactgcttttaaagaaaaacatggaatttaacaatattttaagcccagaacattctgggctttttttggcatacacccttgacatgtaagtgcttgtaatgtatacttatgttagtaacagacatacacttacaggaggtaaaaatgttaaagtttaaacgtgtaagcgcaaagaactatctctctattggagaagtatctatcgacttagataatcgagggcttgttttaatcgagggaattaatgacacgaacgaaacgtttcagagtaatggttcaggtaaaagtacgttgctttcaactgtcacttatgcactatatggcactacacctagtggtttaaaagcggatgctgtaattaacagacaggtcaaaaagaacatgtctgttattttagagtttgaaaaagacggcattccatacagaattgaacgttatcgtaaacatagtaaatttaaaaatacaacgaagttattccaaggagatactgatttaacacaaaaatctgtagctgatacagataaaaaaaattttagacatcttcgggattgattaccttacatatgcaaatagcatcatgtatggacaaggaaacgtagaaatatttgctactgccacagataaaggtaagaagcagatattagaaaatctggctgatattggtgtataccgatatgcacaggacgtagcaaaagaaaaagaaaaagaagctaatgccttagtagaagaacttggtagacaacatatgaccaaggtagctgaaatcgaaacattaaaacaagtttattctagtgcattagagcaatatgctaatacagaaagaatgattgttgctcggaaacaagagtatgaagaagccagagtaaaatataccgaggcagaagacatgctcactcaaatggaacaagaattaacaccaaagattgaacaactaactaaagagttggaagcttgtgcagttccagaagatagctttgcaatatcagaggaattgcgagaacagcagtctaacctgtttaagttaaatcaagcaaaaactactacacaacaagctattaataaagcacaagtagatttgagtaacactgagcaagctacaaattgtcagttatgtggtgcacctctagatgcggaacatcggcaaaaagagatgttccgattgcaacaagaaattcaagagaaacaagctttcattacacaattagattcagcaattgttgcttactctgatttggaacagaaagctaaagaaaaacaggcaagggtacagcaagaagttaatgaagttgttacaaaacaacgcaatatacagtcagctattaatgaactaaacaatcgtttacgtacggctgaaaatgctgtagcacttacacgtaataatgcaactaatctatcaggagccgtagctcacttagagggtattccgaaaccagaatatgacacggaagcggaagctcgtattaaagcagaaatggaagacattactaaacgaaaagaattagcagaacaagaagcaagacaataccatattttagcactagaagtcttctcaaataaagggattcgttcagaagtgttagacttagtaacaccattcttaaatgaacgagctaaccactatttgtctactttatctggttctgatattgaaattagatttagtacacagacagaaaatgcagacggaagtctaaaagataaatttgatttagaggtaattaacggttctggtggagacacctaccaagcaaactctgagggtgagaagaagagaattgatttagctatttccttcgccatccaagacttggtacaatcaaaagcaaacattgctgtgaacctaggcttatacgatgaatgttttgatggcttagattctatcggctgtgaaaatgtgattaagattttgaaagaaagacagaaaaacattagcagtatctttgttattacacataatgacaacctcaaaccattgttcgaaaatgtagttactatgcaaaaaacagaaggaaactccttcttagttgaaaagaaataaggatggtaattacatgaaattatattcagtagataaagggcgtaaccttggaacggtactcgtcccaacaaatgtaggctacacacaacgtttagatttcccgcttgacacattgtttgattggtacccatgttgcccaagatatgattacaagtacagtgatacacgagataagatgtacattgtaatgattgaggaaaatgaaaagcttccgttacgttacaatgttccgtctacaaaaaaacgtgttaagtcaaaaacagcttgctttattacagatacttggtataatcaagaagtagctaatgacaacaagaagttatttagctttgctgaaaactatgacattgtaactcctaacaaagagaattatactctggaagacataaacaagagtattgaacgtgtacaggacattttagacatgctgtatacagttcaagaaaaacaagtagaaaaagacttgattgttcgagttggcactttggaaaaagaagcccctgattcagaagaattgaaggcagtgcatcaggaaattaaagaatacatgcagttagaccgagagggaaaagcttcacatgtattaagcttattaccccaacatgccgaagagttatatgcaaactttggagaagtttacacaatgttaaatctaatgaagaaagtagtgtaggaaatgttctcagaccttctaacaaatgaactaggcataccaaaagacattgaacacgaattgcgatataactgtccgttctgtgaaccaaatcatgactataaactatatgtcaaggttagtgatgatagtacgaatggattgtggatttgttttaagtgtggtcgtaaaggtaaccctatatcgtttgtaatggaatactttggtgtctcttttgaagaagcattagagattctagagggttatggttacagattccagaataagaactacattccaaaagatgattcattaacggatgaagagtacttattgttactacttgatactgtagggaaacctaagacggtagaggaagaagaagaaaaactcacgccccctcctttaccacaaggattccaactattatctcaaaatctatacaatccggaagcatacccatttttagtttattgtcataaacgaggttttactttaaatgacattatccgacacaatattgggtatgtactagacagcacagtcaatcttccatcaggaagacagattaggttgaagaaccatttagtattccttacacatggtgacgatggacagtatcagtattggaatacacgtgcgattgctgatagttatataaagtcctttaatgcacctagtaaggatggagagtactccaagaagaatactatattcaatcttaacattgcatgtaaaactccacaagtagtcattactgagggggttcctgatgcactaactttaggagaatctggtgtaggtacatttggtaaacaggttacagatgcgcagattaatttaatacttaagagtgttactcctgagcaaccaatttatgtgtatctagataaggatgcaaagaatgagataaaaaaaacttgcagagcgtttgtatgaacgacataaagaaacttatattgttataagccctacagacaaagacccgaacagtattggtaaagagagtgcttgggaaattattaagaaccattctgtaaaggcagacggtgtaggtataatcaaattgatgttataggaggtacgtatgagtaacattaagtatgaagtacattgggtgcatcaccaattagggggtagacaaaacacatggtgtatttggaacattagataaagctattgagtccatctatgattggtggacacagaatgactacaatccaccatatgttcgtatgtggacagtagatggtataactacattggactatggatttcaccacatgttttataaaatcaaagaaataaaggagactaatgaattgaatccagtagttaagtttactaagagtgagggagccattgccccaaaacgaggacgagaagctgatgtagcacacgacttgtttacagataaggatgctgtaattttaccgggaagactgggagcaacagtagttactacaggaattagaacagcttttgaccctaattcgtatgggctgtttatcaacccacgtggtggcatgatgaaatacccattaactctaggtaatacacaaggtgttgttgaaggagaataccgtggggatgttgggcttcctcttaagaatactttctctttacaattcggagaatatactaacgctactcgtgttttagttattaccgaagacggtaagcttgtaggaaaaccagttaaagaagtacgtgaaagctatccagaatttgataagctttatgaagaacagctaactaaactaggtaatgagctagatttaatctatgacaatatatttactggtgtttctgaaacccatgttgttgcaggaactatctttattccaaaaggtactcgtttatgtcaagcattcttgcttccacgttacgctactaattttgttgaagtagacgaattagacgaaacagaacgtggtgaaggtgcatatggttcgtctggtgttaaataatggctagtcgtataccggatttaaagatgccacttctttatcttgtaggaagtgcttctattggtactcgtgagcgtggctgtgatgtaacagttaccttacgagacttttatgtagacacccctgatgacaagttagagcaactaataactttgacgtacaaagaagacaaaattgaaaattttacacgacttagtgcagataaatgttcatttcgtgttatactaggagagtaggcaatgaaagaatcaccaagtgtaaaacttacagaaactcatacagttactcttgtaaacactgacgtacttaaaataggacaggttattggctttagagttaacagtcctaagcaagtaggtgcagaagtagtagatgtttattccgaagctgtcggggttattgaacgtatctggtcagaacgaattgaggtcttaaacctgattacaggtggtcgtacagacctatgggcaaatacgttcgattggagagaaattgaaatactgtcagatgcggaacatctgttggaggcatataagaatggaatttgctgagtatttcaataaaatgcaagagcactatgtaaaaggtgaaactgttgaggtagaaaagcttgttaaaagcgatggttcaaaactagttacctatgctgagtttgaggatgctttagctactgtagcacaggttaccacacttgctattgaagaagcattccaagcacaggaagctaagtttggtcttgtactaaaaacattaagagaacaaaaagttatctcagaagatactgaaaaagctattcttgctgagtttaataatataaatgaacttatggaggacgacattaatgagtaaaaaagcaaaacgtgtaggatttatttctgaggaagatatgagaacatggacagagtatttagctacaggacatgttcatgataaaaaccatgcaaaacagttagaacgtttaagtaaacgtgatattagcttaggggacgtagctactgtcgtagatttcatgtcaagacgtaatgatggttatatcactgctctaatcgaacaaaactctgttaatgaaaaattacttaataaattgggtgtaacagatgaaatgcgtaatgaagcgaaagccgaatacgaagttgaattgaaacaagcacaggaagaaattaaaaagttacaagaagagctagctgaaaaactacaaaagggtgagtaatatgagcacacatgaggaattacgtgaacttggtttagttgacgaacaaggtagcttaaagatagaagctagaaaaacaatggaaattccgttacaagcactagctgatttattaaacgataaggtatccagtgattctggggtatacgtaagtgactgctttcaaagtgttatgattcgggaggaacgaccttatcgagtagttaaggggtttcatgatattcctacgttggtattttcgggaacagtttacccattagacagactaacctgttatccatacattcataatattaactatcaggatgtaagtttatttaaacctgttaaagaggaacatgtagaccaaataattttcatggtacaaaacctttataatttgaacaatagaaacaacaatttgtatatgcagtttaagagataccaatgtggaaaagttacctatgaagaaataatgaacacacttaagtctaatatggagttctggtctgtacctaattatgtagaatcattagttgaagagtattatgtgaacccacatctattcgatgttaaaacacctgtagaacaactaattgaacaagtagaacttattgagtctagacgtaaacgtgttaaagaaagggatgacgagagtacccatgactgattacagtgcagtaggaagaaagtcaaaatctaaaggtgctcggtttgaactagaaacagctaagaatttatctaagtggtggggacatgactttcaccgtgtccccgcttctggtggcttacattggaaagggagtaacaatgttgttggagatattgtagctcctatagaggcaggatttccttttgttgttgaatgtaaaaaccgtgaagaatggactatagagaacttattcctcaataataaagaaataaaaaattggtgggcacaggttgttggtgatgctaaagaatctggtaagattcctatgcttatctttacccgtaatcgtgctaaaacttttgtgatgatggcttacaacgaagacctcatcaaagaaatcgaagaccgtggttatcctcttatggtctctaatgtagagtatgtagacgggtataaagatacccattgttataaaacatttactactgtgttagaagctattacaagctttaaacctcgtaagagccaaggggaagaacatctactccattattttaacccaaaagagtatgattggcaaaaatctggtcttgtccgagaaacaaaaaagatggaagaagcaaaacaacttgatgttgaggagtctttggacttacttgttaattcctatttagaaggagaaaaataatggcagaaagaaactttccagaagctattaaaacttactattcttacttacgtgttcctgatttaaaagaacaagtatccagtatctctattgattttgtagagaactggacaggtcaagaagaacggtatgtacttgatacgctcacttctgaaattaagcctcgtttatacagcttagaaacagcgtatatcattgaggacttttcactaccgggaaaaagaagttgacgtaaacgtagatgaattgagcaaagaagtagcagagttcttttaaaaaagcatctacagacttgaaagaagcaattgaggcatctaatgacaatcaaccaagtcattcagaagatactgaaccgattaacgattgaccaattagaagtcactcctgcgatggtagacattgttcttgaatatttacccgcaggcttgcttttaacagccaataacgagggttgggatgcggtagagcctgacctgcaagaagtgattatttccaatttggaaaaaatgagaggagcatctaaatgattgaatcaagtaatgtaaatcatccaaaacactatacacagggaggtacagaagtaattgacgttattgaatacctaacttctaagtatcctccatcaatccgttactcattaggtaatgtgattaaatatgtttgccgtgcaccgtacaaaggaaaagaggaagaagacttaaataagggtcattggtacttgaatcgcagtcagtcagatattactgcaagcgtaagtaaaactacgtgctctattcctacttttgacatggaagctttcatccaagatactgcaaaaggctatcgtgaagaacagcaaccattctttaaatccattatgtacatgttggatgatacagaaggaactcctgtgttccgaatattaaaccttgttgagcgtgaccttaaggctcttaaaattgcatagttactactaggtagtacagagttttgctccttttgcttgtaaggcgttcctgtcagttatgttataatagagataggaaaactaaatagcaaaaggagtttaattatgagtagcacacctcgagtaaagcggttaaatatctataataccgaccgacactttaatataaacttaatgaaacgtgaagacattgcaaataaaattaaagtgaatcggttaaatgaaaaagaaattgagaaagagatggacgaactaagcgaagtatcggttgtcacaccagtgtggacaatgaacatgaagaatgaaaagtcctatctcttataccaagaaaaagtatacaaatgatacattgatacagaaattattcaaacatgcaggttctgtttcttactatacagatacaattgtaccttattatgttattgaacagattgctaaaaatctaacaagtgaagtaatttatccaacaaaacctaaatatgaaaatagagagattgaaaatattcagctagcatttacggcttgtcctgtaaccattgattgtccagtagttattccagatgttagtccttatgacgttttatttgctttacatcccttaaaaacaagtgtagacaaagtacaaatttcatttccgtggctgtcagaatcagaaatatctgatagacatagacgttattatcataaagttggagaccattatgaggttaaagcaaaatataaatatcaattctttaaatatgtccagacctcactatccatctgggctatgaacatttggattgtttgtgatagtgatgaggattttgccaatgtcgattactatgtacaaaaagaaaaaaataaaagaaacgtcaatagagaacgtgctctccaacgaaaggagaagtccgatgagtaaagataaaacaatgaaccggactgatgttgcacgtgccatctctcaatatacaggttatcgtatgaaagacgtgttagctatcttacaaatggaagatgaggttatcacacaagcaatttcacaaggaatatcaattaaaaaccataaattatggaaattgaatattaagaaaaaacctgagaaagtcgcatgggatggcatttctaagaagacgtttattcaaccagaaaaatatgtagttaagtttgtgccactttctaggttgaaagaagctatagatacttacaatgaagagaatgattagtcattctcttttttttgcccttgacataccttacaaaaatgctatactgaaatagtagaattacagaaaggggaagagagcttgaaaatactgttcttacaagattatatcagagagacccatgtacataacagtcagaatggacaatatgtagactataaacgtactgacatgggtaaaaagcttacaagtttacttaacgacataggtctaacaggtcgtgattacatgattgactacgattatgacctaattcctgaaccacagaaggtaaataataaaacaggtaaagttattaaatacaaggagcctgtattaaaactccggaaagaacctgaaaaacgtttattaaaacgattaatgaaaacaaaaccagacatcattattcctatgggaggaatgggatgtaagaacttattgaatagtacttctattacgaaagcacgtggtgttcctgtacaaaaaacaattactgatgaggaaacaggagagttttttgatacatggattttaccaatgtttagtatggaatacttgtcaatgaatcctaatattgagaacttggtaaaagcagacatttctactttatctcgttttattgcagagggtgcacaagcatttgagccaaagaaagttgagtatgagcttgttatgacaattgaacgagtgaaacaaatctttgagttcttgtctcggtttaaacctcttactgcatgggacttggaaacaaatagtctacgtggagatgtattaggtgcgaaaccactagttatgtctcttagttgggaagagggtcagggtgttacgattcccttagaacatcatgaatccccttggaatgaagaagaactagctattgtatacaatcatttacaagcttttgtagctgatgcacagcaaccaaaggtaggacacaatattcagtttgatattcgtttcttaatgaacacaaaagggtttgcttattttgagaataaccgtgatacattgattgggtattacttaatcgtagcacagaaaattgaaagctctaaacgtttgtcagaccttgcttatgaactaactgatatgggcggttatgataacccattagaagattataagaagaaatacaaggaagactacattgctcgtaagaaagctgaaattgatgagttaaaagcttctgagaaagcacgtgtagagaaggagtataaactagcacaggctaaatacaaagaagaagtggcaaaagctaagaaattaggtaagtctaccaaatcaattttgaaacctgtaaaagaaaaagtagttgttccttctaagacagaagttaaaactgtgaatgaaattgatggtggagactttaactatgattggattccattagaaattatgcacccatacgcaagtggagatacagattgttgcttacgtatttataacgtactataccaacgaattgctcctcatgaaaagattctagctctttggacagacttttatcctaaacttacacggacacttgctcatctagaagcagaaggtatcttcgttgataaagaatatgcgaaagttcttgaaaaggtatatgcggaagaggaagaacgtcttatcgaagaattacgtaagttccctgctgttaaagagttagaagcagagcatatggcactttataaagcaggtctagaagaatggaagaaacccaagtcagaacgagacgaagaggttgccaaacttcgtgataaatataagatttctgataaggaaaacaaagttaagttcaatcccggctctgctgtccataaaggaaaagtcctttataagattcttggtctaacactaccttatgataaagagtccattaaagagaaaccttttgataatggtgttcctgaaaacgaactaacttgggaagactacaagacagataaacatgctttgggctatatcgcagagcacgatgaagatgcaaaagaattagcagaaatgctacttgaatactctaaagtaaataccttgaagaacaactttgctcagaaacttccgttactagcttcaaacaaagatggaaaagtacatggttcgttcaagattactggtacagaaacaagccgtttatcttcaaaagagcctaacatgcaacaagtaccgtctaaagttggagaccctaatcgttttgattatacgtatccaattaagcgtatgtttaaaacgagttttgagaacggggctttattacagctcgactactcagccctagaaatgcgtatcctagctttagtagccggagacgaagcgatgacccaagctttcttagacggagaggacttacacaaatcaaccgcttctattgtttggaaagtacctgtatcagaagtatctaaggatatgcgtaagaatgctaagagtgttaattttggtattgcttatggtgaaacacctttctctattgctcctaaattaggtgtaacaccagaagaagctgaacgtatctttgaagactactttgcaaacaaaccacgtattaaatcctttattgatgaaacacatgagtttgttaaagaaaacgggtatgtagatactttacaaggacaccgtagattgattcgtgatgcgttctctaaagaccgtaacacattcaatggtgctttacgtaagtcagtaaacacaatcattcaaggaactggtgcatacttaacaaacatgtctctggtgtatattgacgattatctaagaactaaaggtatgaagtctcgtattgctattacagtacatgactccattgtaattgattgtcctcgtgaagaagtagacgaagtagcaaaagtagcttgttttatcatggaaaacctaccaattgatttcttaacaattaattggaaaggagaacaaatgagattccctattgtagctgatgtagaaatcggagaaaactacaatgacatggttgactatgatgcagaagaagtgaacaaatttgcttcttataaaggatacgttaagtattacaaagaccaagctaaatttgaagactataagaacgcaggtatgattagtgaggaacaaatggaagccggtattaatgctgttaaggcttgcatagaacagtacaaactaattgcgtaagtcttacaaatttatttaaaaaaattacaaaatgacgttgccctaacatgtaatgtgtgctataataatagagcagacaagttagggaatgtctgtaatattggaaaggagaataagacagtgtgctagacttacgagtgaacgaccttgaatttcgtaagatacgagttaccgatgaaaacggtgaaactattgtgtttgaccttacagaggaactacaggtaaacgagtttagtgttcggcaagcgttcttagaacagcctgcgaaatacacgtattggacttctttacttgaacgcttacgaatgtaccaagaaaactacgagttacaagctgagaagcgtaaagcagaactgtatgaaccttctagaaagtctttgattgagcaaggggtaactaagccaacaaaagaccaaatagaagcacagattatgcttgacgaacagtattatgctctgagacagaacataatcagtttaacatttaatgttagacaagtgcaatatgtagtaaaagcctttgaacaaaggaaagacatgttgattcagtatggtgcagacttacggagggatttcgagtatagccagaaagtgtctatgccagacccactaaaaggtcaaaggacaagttataacaatccatataacacataaccttagaacctagttgaacaacacataattcgagaaaccaaaataaaaaaacaaaagaatggagaaattaacgtgaactttcaagaacaattaaaacaacaacttgcccaacaaaaccgaggagaacgtgccgaggtagactatccttccaatcatcttaaacacaaagagctatttattccaaaagaaactaatcaagtgttagttcgtatcttacctcctagtgtttctggtgaaaactacaaccaaatggttcgtgaaatctttttacaagcacataaccgtaacggtaaagaactaaaattaaatgctgtcttatctgcattccctaacgtagaagacccattagaccaagcacttattaactggaatgcacaaaaccgtgttcctaacaaatggaacaaaaatgcaactccaactaagaagtatcttgctaatgttatccaattaattagagacccacaaacaggtcaattccgatatgaaacggatgaacaaggaaacttgatggtacgcctattcaagttatctcattcagcttgccaagctattaatgctaagttaactgatactatgttaacaccaaactttaacccagatgttcctgattctgttaaacaatacagcttcatttcatctgcggaagcattcccagtaatgattagcaaacctgctaaaggttctggtcaaatgtcttacggtgttgatgtttatagtaacatgcctctaggagctttaccacaaggatgggaaactcaactagaagacttagcttatcaagctacaccttcatacagctacaataaagagtacattgattactttattgatgtagtaaacggtgttgaacctgtgagccaagcacaaggtggacaacaagtacaaccacaacaaggttaccaagctcctgcaatgggacaaggctttgcttctgctccacaacaacctgcttacaacatggcacaaccacagcaaccaatgaatactggttttaaccaacaacctgtagctccggttcaaccacaagctacaaacatgggtaccccttcatttggtcaaacaaatatgggaacaccacctacaatgaacggtggatttgcgcaagcaccacaacaacctgtacaacctgctccaattgcagaccctatgggttttcaaatgccaatgaatcaagcaccagtaactgacccatctactatttcagatgctgatatgccttttaacatgcaagcaatgccagatgtaacaccgcaagcaacaagtgttcctgagcaaccagtagttgcaactcctgaaccaccacaacaagctcctgtagcacctgtagaaacagctacaaatactactttaccagatgttgatagcttgctacaacaaatgcaaggttagtaatagaggaacagggggctgaaatagccccttcttctatttaaatttgatatgtaattcattactaggaggaacaaatcttggcaagaaaaagacaaagtgaaacagtagaagcaggtacaattgatttaacaaaagaattgggcttaacttcttttagagatacaaaattttctagtgtagcagaccgactacctacaatgattcctcaattagactacatcttaggtggaggacttccatttggacgtatggtagaggttatcggaaagaactctagtggtaaatctacttttgcagtacaccttactaaaattgctcaactattgaaggtgccaacattgtggattgacgtagagggaactgctgaccctgaccgtttagctgaactgggagtaaatcctgatgcaggggatgtattcatggtagagcctgctttgaaaaaagacggtactaaggatacaatgacagtagaacgggtagcagaagagctacaacgtatcctaccagtaattaataagacaggtaaacctattttaattatctgggattccgtagcacagaccgccgctgaaaaagaaattgaacgtggtgtaggtaaccaacaaccgggtattaaagctaaagcaatggcacaattctcacaaatcattgcacctttaatgactaattcgaaagcattatttgttgcaattaaccaagctcgtgatgagatgggtagtatgttcggaggtattgattctccgggaggacatgcacttcaccactgggctagcttacgactagaagtccaaaaagcaagtaagattgaaaatagtgaagtaaacgcctttggtgtagaagaaaaatcttatatcggacatatcatgcgtattaaaacgttaaaatctaaagtatccagaccacagcaaaaagctgaaatgtacttaatggctgattcaggtttagaccttgaagaaaacatctaccgtgcatgtttcgcaactaataagcaatatggactcattagcggtggtgcatggaaagcttacacaacagatgcaggtcaagaaatcaagttcaattctgaaaagaattgggtagacttcttgaaatcagaagaagggcaacctgtacgtgatgaactatttgctaaaatgatggctcgtagtttccctaatggatacgcaccttataaaaatgaagagattgatatttgtcaaataccattatataaatacgttaaagattacatggaaactcataaagaagaagcacaacctgtagaagagcaaacagctcctgtatctgcaacagatgtttcagacttattagaccaaattaagtaaggggcgttatgcccctttttataagagatggaggaaacctaattgcgtaaaactacaccagttaacaccgtactagaagccttagaaatgtttcaacaaggaacagcaactacagaggttcgtacgcctatttctttacaatctgtacgtaaacgtttcttagatgctaaagaagcaggaaaacgtgtattgattgaaaactctgatttaagtagtgcaaactctgttgttgttgatattgactatgtaggtagccgttggtgcttaggttatcaaaaagtattgtactttggagaagaggtacgtattccacatactatccatttctgtgatgtatacggagcttacggtaatgaagcacaaagaagcaaacgacaagtgaaaatcatttttgaaggagagaacccttttgagtagagaccttaacaaagaggaacgtgagattagaaacggaaatcgtttcatcactgaggttcacggtaagggggtctttccacgagatgttgatagactgtaccaccgttatgctaacttacgttacaaggtctataacactcataaagactcttttcgaagtgaagcctcacgaaaagaactaagaagttatattgatgaacaatttatcaagttaacgaaagaatatgatattaacggagaggtcgattttccgggatatatcaaaaaagctcttaatctaagagttagacatagctttgtgaaaggacgttttcgtgatagtgctcgtgaacgtctgggagcagaggacaacgagattgaaacattactgggaacagacacctcttctcaggaagcaattgaagatgctgaactaattgatgatttactatctaaagcgaagtttagccctgtagaattagctgtattcagctacttgctacgaggtaaggtaaaagatgctaatatcattaaagaggtgtcagcgaagtataaagtgtctcaaaagtccgttagagatgcaatcaaaaacgtgcgggagtacgttgcgttaaatcttaaagaccgatagaattagttaaaatcctccttgtgtgtatgctatattagcagtagaaacacaaaggaggatttttgtaatggaagaacaaaacaacactggcaaatacgctccatttattcgactaattgtaatgggtatctccttcgtggctactggtttaacaactatgtttggttgggaaccactaccttttacagacgaacaaatgaaccaaggtttaatgcttgtactttctgttggacttgctatctataactggtacaagaacaacgctgttactaagtacggtaaagctaaagagcaagcaggtaaagaagttgtcggaactcgacaagacttcaaacaacaaggctaagtttgaggggataaaacccctccttagttgatattaaaggagtatgacaatggaactaacaaatttaagtgctaaaacactacccgaattaaacgggaagtttcttgttgtagagactctatcagacggatacacaggaaccgtaaacggtcattataactatgaagttgttactaaaggtgaggactatgaaatctatcccacactttggaacaacgaaaaagcgcagtttgtaaaagctgacgaaatggttgtgtatacaaacggagatactgtattctatgtaacaagaacaacaaaagacccctataaccatgctgttatcagtgagttaatcgttgaagaaggaatggataaggataagcgcacccttcaagctttccgactattcgcagacgatttattctctatcggaaactataacgtgttcttaacacaccaaattgatgtagtagacagcccaaataacgtaaaagttgaatcagtttccttagacaaagaatccggaacattatatgtgggtgacacagtagaattaacagcaactgtactaccagaaaatgccacagtcaaagatgtaacattctctgttgttccagaaggaattgctactgtaactgctactggtgccaaggcaacagttacagctaaagtaaaaggttcagctaatgttatcgtaactacattagacggagacaaaacagctcaatatgctttaacagtgaaagaacacgtttcagtttctggtattactttaaataaagaagctacttcaattgttaaaggtgctacagaaacacttgttgcaacagtaactccaccagatgcagaaaacaaagctgtaacatgggcatctgataaacctgctgtagctaaagtagaccaaaacgggaaggttacagcagtagacggtggtaccgctaatattactgcgacaacagttgacggtaagaaagtagcaacttgtgttgtgacagtaactgttcctgtaacaggcgttacactagatacgaatgctattactttagaaattgacggtacacaaaaattagtagcaacagttgctcctattaacgcaacaaataaaaaagtaacgtggaaatccgataaaccggaaattgctactgtagaccaagaaggtacagtgacaggtattgcagacggtacagctaacgtaacagcagaaacagaagatggtaagaaagtagctacttgtgctgtaacagttaaccctgcgcaagcataatatactaggaaaagaggaatactaaaatggctaaagaaatcgcaaatattgcagacttattaaaaccaagcgtagatactgttgaattggatggtaaatatcttgtagtacctaccctatcagatgggtatacaggtacagtacagggtgcttacgcttatgaagtgaagaaatcaggaacagattacaaagtgagtgaacttatctatgataaagacaagaacacgtttactcctgcggatgctccaattatcatgacagatgacgatacaattttctttgttactcgtacgttgattgacccttataactatccagtgattagtgaagctacagttaaagcccacgaggtcaaagaaaaacaagtacttcaagcgtttattgcctttgcagaagacagattcaaactaggagtatacaacgtattcttagcagacgacccttacatcttgcaagacaaagcagaagaaggaatcggcggatgataaaaagagaccaaaaaggtctcttttttgttgacaaacaaaatactctctgatatactttaggtataagataaatgaaggagagatttacatggttgtattattagtcgctactactgtagcatttatggttttgagtatggtgttagaacactataaaaagaaggaacagagagcaagactgctaaagcttttgcattcttatctatcttttctggttttattgggttcttagttatcttaactatttcaccaacacttaaccgagctggcattattaaatatgaagtacactctgctgaaaactatgtaactagctacacagaggaagtaaaggtttgggaagcacgagacaccaaagaccctgtaatttttaactatctacaagagtcaaaacaagacctttctagagctaaagttcaactagagaatgcaaaggacaaacttaacaaattagaacaggcaaaatggtggtggaactttaacttgttctagtacaaaaaacctgtacaaaatttaaataaagtgttgacgacttacacctctcttggtatacttagactatactaaataagagaggtgttttattgtggttaaagctaaaaaacctgtacaaagacgtagaggaacttacaatagttgtgatgtgcttgttgaagaagaaaatggtttctttttctatagcgtacttaattcagagggtacagaaatcatgagtggctttagagataaaggctcacaagatattttaaccttctacaactatttgcttaagctagtagatgactacattaaatatccggagggttttattgcggatgtttaaacgtaaaaaatactatgtaattcagttagtagttcaaccagacagtaagccttggtaccgagaaattcttatccaaagggaagatgggtatctattaacaggagcttacaacagggagtgtaaagtagagcctaaatactcaactttggatacggagtacaaacaggtgtttactgaaaaagaaatacgtgcaatcaatccagattacatgtactttgcagtggaggtgaccaaggatggcagacctattaatgataactaagaagaatgttcaaggttatgtattaaactacttacttaagcaattagctgtgaaaagtgaacacaactacacttgtgagtttttagataagtttaacttacctgatattaaaaattatgcgaataaagcagatgtactaattatttcaggcttccctttttatgagagccaacgtactactgtggatgaagcattacaggtaatgaacaatccgtttagtcaattctttcacttagcaacttttggggatacctatagcaacgagggtagttttcattcatatgtagatgaattagtaagccctgtaggtaacttccctaaaataattaaagaactagagaacttcttgaaatttaatgatgtaattcggcacctgcttctaagtgatatggaaagtatcatcgaagcaaccgatgcgtataatcgttatgaggtaacagatactattctagactgggtttctcttgtagaaacgtacagagagcagttatacgcaagatacggagtaggtacagacttagaggagatacttgataaggataaaaccttagtcaaagcattgcgggagaaaaaagacgattatatcaaaagaacacttggcagaacatctgcacaggtaatcaacggtacagtcgtatgttttacttatgcagaggaatatgtaaatgaggtagcccataaactgattgagttttatcaatcgtacaactatacaaaagtagctgtctttgttggacgacataccaaaggtgatgatatgttcagtattcgaacagcaggtatagatgcgggagaacttgcctataaggtaaacagaggtagaggaaaacctactactgcaactgttttcttaggtaattcaggtcaatccacattcaacgcattacttaacacacttgctcaaattgtataacaagtaagtgtgttataataatgttaggtataaaacaatacacagggagtgtgctacttgaaaaagaataaaatgctagaagacctaatgaaacaattagataacccatacgtaattggggcaattattgcaggaactttgcaacatgactttaaccgtatacacgttagcaaatataataaatatgctcgtgagtttggtttagaccgagagaacaaagaaagcttagaagcactaattgaacatttcgattctgataagttattaaaggaattgtacatgtcaagtattgcaggagaaattaatgtggacatgcttcgttcatttaaagacaaaacgaaaaaatccgcattccagactttatctccattcgtggtagacaaccaagctgttttagctcgtaatcgtgagttcaacaagattcaacgtgagggtgcttacttagaccacttaatcgaaggcttgaaagagcacttatccgaagaacttgaaaatactaatacacttaaatatattgaaccagaattacgagtaaaaggcaagccaagtgaccgtgaaatgattctatgtttatctgactggcatattggagctttcgttaacaatattgatacaggcggatacaattatgacattttccgtgaacggctaaacagtctattgtcagaagctttccgtattgttaaagaacaaaacattcgaacagtacatgtttaccatattggagacattattgaacatatcaatatgcgtaatgtaaaccaagcatttgaagcagagtttccggcaacagaacaaattgctaaagggattcgagtattagttgaaacactaaatgtcctagctaaagcgggtctagatgtaacctttggtatggtaggtggtaaccacgaccgattccaaggaaataaaaatgataaaattcataatgataacgttgcttacttagttgtagaccagttacactttatgcaagacttagggtctctacacaaaaatgtaactttaattgataacagacaagacgtttacagctttaaagacaccgtagcaggtaaacgcattaaagttgttcatggagacaatgaaggtaagaaagtagacgttaagattccaaaacatattaaagaagaagttattgaatatttaatcatgggacatatccatacaacacgtattattcaagaagactattcacgattccatgtatacgttgggtctcctatgggtgcaaataactattcagcagaaaacaatctaccaacaacaagtccggcacaattaattatggtcttagaccctaaagtggatagcccacaatttatgccaatctttttgtaggagagtgatagaatgaacccgatttatttttttactatctatcatgtatgtattcgagtttggacaagcattcttgaatacgaaacgaaaagaacgatatatgattgaagatggtggagaacctcttcctagaagctcttacgtgttcttattcattcaatatgtattgcgtactcttttcgcaatcttgcttatttttattgtaccagagagcctacagttcaacgtaggaggtattactgcctttatagtagttttgcttattattccatttatctctcggttcattgaagttggtattcgggtattgattattaaatacttgcaagccaagcacataaaacgtattaagaaacaaggggacgaaaaagagactaattagagtctcttttttgttatgttatattaagtattgaggtgaaaagaatgaaatatacagaaatccaagtaggtgacggacaaagcaccttattagatgtaaaaagcaaacctgccttaattcgtagaggcacattaacaatgaaagttaaatcaagagatagtttaatcagtaaggtagaagagaaacctgtatatattgttgagttagcagaagaatcctatggtacaagcgttgtttctgtttttagtgcagtacaggagggaagcggagaccatgtagttgttcagaaggcttacacagagaatatcactaaaccatcattcaaaggaactacgtttttaggtaaggttgctcaaaaggttcatgaaaagagcttaaaaccaaaacgggtaatcacaactaaaccccctgtttttctagcgcctgttgtcatgggagtagacacctttacacaggaacacggactaggattttatgaacgagaaccagataaatttgttatgaaagacgggcatcctagtattgagtatggaaagaacacaggagtctttatttgcttaaactctattaagtgggataaagcttatgtcaatgcaggacaattgattcaagactatgtagcagacaaacaactatggtttaatctgggaggaactaaaccacaatttaagagtgaagttaatcaatgaccgataaccgtttctatgaggcagacatacaagagttaatcttgaacaaaaaacgtatttttggagacatcggggaaagtgctattgtatttgagaaagcagttatgcgagggaatactatttgtgattgtttaatctttacagaaaaacgaggcgttattggtattgaaattaagacagaacgtgattcaacaaaacgtttgaataagcaacttaaagattatgaaaaagtctgtgattttgtttatgttctttgtcatgatacacatgtaccaaaaagtggaacagattctaaatagatacaatcatagacatgttggtattttagcttatacggagttcatgggtgaagctatgttaggaatatacaaagaagcaaccccttcaccaagtaagagtgcttatcatatgctagacattctttggaaagaagaaattctaaagatgttaggtacgttcagacattacggtattcgagtagagactgctacaggaaccaaatttatgcacacagctaaccgtagcggaggtgtgagtggtctttatacgaagtctgcgaccggtaggacgatgcgaaagccagacttgataagaaaccttataaatcgtgtagggggtgctgaggaggctactagggtcttctgtgacgtgttcattcataatagacagcatccagagaaagctattaagttaagacactttaaacagcaaccaataaggagtgataacgatgagtaaacaaggactaccttttggtacttgggagaactccgcaggaagaaactacacagggttaggtaacgcagataacggacataataagaaacgaatgtccacaagaggatattatcacgtagctctgacaaaagagtataggggactaacagagagggactttgaactaaaacttgaatatgggaaagaccttgtttctcaatatacaggtgtaccgattgacatgcttgttcttcgtaaaaaacagaaaaacaaacactttcgtctatagatagtgtatactatgtttgtcgaggaaaggaacctatcggtaagctgtctgtaagggcacagagacggtttaaagaccttggactcacatttgtatacctagagaagaactacgcccctaaagtggtgagaagggtgtctaagggacagcgtagccttctgggacaaacgaaatcagataaacgtaaagcaaaccgaaaacaaaagaagccaaaaacaacaaattaggaggacaatcatgctaagtaaggggaaacaagttacacttagaaagttaaacaatattattacaaataaggaatacatccttataggtgctcgttacacgaacgattctttagaacgagatattcctattacaactgtaattgacgatatacttatagatttgaagaaagagacaatggcaggttgtgttttctttagaccagtaggagatgcacaaagaaatgccttatctctattaaaagatgcgtgtatgcactttggttacggagaatttttagatgaagctattgaacgtcctgcattgtatgcggggctaaaagcaaacgttatgctacctgatacagccttctcaaatatccaagaaatcccattcaatttttatttcacagaaccagaaatattttgtgaagaagtaactatcaagggaagaaaacatattcagtacactgtcttagatagaatcagtttagatgatgtacaacatgtagaacaatctcttgttattcttttccgtaaagcagagtatgatggagaaaccctgttaggtgcttatacggatacaaaattaacaaagacagaagcaatcaaaatccttcaatttgttagtaatggttccttacttgaacaggtagttggggcagttactgtattctcagataaagtagtgtctacacttattcctttgtttaatgatgtggatataagctttatgaaatcaggagaaggaaaccctgttgtctctattacagcagatacaggaggcattgcctttgatgaaaaagatttggacggtatgtctattgaatctcctagtttcggagcttaccgtcttgtgttacatgtagggaaggatacagtaagtattttaattggataaatttttttgtaagggagtcaaattatatattgactcccttatttttgtgtgctaagataagttcagttgttgtacaaggttacaatgacaacatgtacaggagggaaagaaatgagtgtagcatcaagtttagatagagctgatgaatggttgttgtcgcatttgtgtgataagcgtttagaatatttgtctcaaaaagaagagttaactgcaaatgaaaaagcagaaatattactaattcaagagcttaatatgaaactaatatgtaataccttacaaaaagaggtatctgttcaaaccgtacagggttctgacgttactagtggcttattaagcaaagcttacacaaactctgttaacattacatcccaagaagcgtggtatacatctttgttgaaacgtacgcttgatgttgttgatggaataccttgtgtaggtaatgttactgtatttgtggactcagatgagattagtatttcaattatggggcacatacgacacgacaatgatttagcctgcgatgtctacgaaatttcttttgaaaaccttggaggtatcgaagattttctaattcatgttgagggagtagaaatagctttaccggactatttagagtttattaccgaggaactacctgccattttaaaaaaatcattatgaggagagagaataatggatttaaaacaagcttacaactatgcagtagaacatttaaatgaaaatgccaaaacagaaagtgaacgtatctatgtattgggtgtcttccaactaggaagtcgatatgccggatacgatattgaatcaagtgattacgattttacagtcgtttacatgccgtctgcttatgatttattaaaccgtgagtatggacgtagcaaaattaagtttgaacacaatgattatgaagtggaaatgtcctttatggatattcgtaaatacctaaatcgtttattatcaagctcactagaaacattacaaatggtgtttgcaccttccagtatgagttactatgctaaatttggagacgataacctatcattgcgagcagaagaacttgtagatttcatgttaaaactacgtgataaccgtaagtcttttgtttatttgaacacagataagctatacgattcaatttcaggaagagcaaagtcttctatgggtaacgctagcattagttacacaaatgatgaatatggtcgaacagtcaagtatgcgattggtgttgaatacatgcaagacctacttcaagcattatactacaatgaagacattcgagaaggtttgactgtttcacctatgcaggcacctatttataaggaacatcggaacaatcctagctatgaaattgctcgtttgtaccattctcgtgctgttaaccttattgagaaaatggtcttaaacaaagcagtggttcgtgaaactttacgaaaattacagccgaccgaagatacaattaaggtagtaagagaagtatggacagaagaatttgtaaacattatcttgggaggttatgacgactaatgatgacaacagcagtaagagaaagaacattagatgaaatcttaaccaatcctaagaaaccaatgacagagaaactggttgaagctgaacaactaatcaagaacagtgagcatgtttatgactttgggttaggtacaattagagaaactatggtgatgtctggcaaaaactggttagctagtcacttatatatcaaagaagttactacttatggatttatcctgcaagccgttgtatataaacagtccttagttgagcgggctgttactaacgatgaaggtgaagaaataaaacccgcttcttatgactatgagctaaaccgtgtttacgagttagaatatagtctacgagataagtatactagactacttaaaaatggtagtcccttgaaattctcagagaacaacatcaaaaacatgttttctggtcaagaaggtgttattcaaaaattagattcatgctgtaataccgagatgtactcttctatgtatgacgtatttagttgtattggaaatgaatcagtaccccaagtagctcgttttcttgttagatttatgcaattgaacgtggtagaactaatctataaaagtggggttcctattccttttgctaaagactttgctagagaccaagcaaagaaacttgaaaaaggtggcaattggtatgctagcccagaacctacagctaactgggtagattgcacagctactgcacctgcaaaggttcttgatgttccaaagtctttatttaaaattatttgtcaaggaaatgttagtttcagtagatatgtttcaatgcacagagctatagaaagagctgaaagtatgggttttgaagaggaacctcgtgaggaatggaacagggaactacgaatgtatattaaacccgaagaagatgaagctattgtacaaaaaaggaagaagtacaatgagaaatgtctaaaacgaaataaacagggtatcattcgagcttgtggtgccctgtatcatttgttcacctttgctgtggaactagatagtgaatatggaattgagaaagctagtaatttagcttctcatgagttcgaagatatgttatacagggaagtggtacctgcccgtgtaaacagcctacagaataactcagcagtttgtattgccttttctttaggattggagttaaatcgtgttgctagatacatgtactatcaattacatgtagaacaaggatttactgatggatattataatgcaacttaccgtgactacctacgtatgatgagacaactagagattgcagataaaggtaattaccctaaatcattgaaaacagtgcatgatgtagctgaaatgaatactagaatgattaaggataaagaactggcagataactttgcagaacaagtcaaacattaccgagagtgggaagacgttaaagttcgtggtagcaagtatattatgcgtgcacctgagagtatagacgaccttgccaaagaaggttctagtctaagtcactgtgtgttcagttatgctcgttcagtagccctaggagaaactacgattatgttcttacgtactaaagcttgtccagatgatagcttggttacagttgagattaagtacagccctagtcgagaatgctatagaattgtgcaagctcgtggtcattccaatcgagcattaacgactgcggagaacgagttcttagagaaatggtgtaaaaaatcaggaaatgtggagagaaaataagctattttaaaatgaaaaaatactactagttagttcattttcttaagttagctaaaacgattcatttcaaataacaattttccacctacaaatgtttcatatataattcacagaaaaaatacaaaaaaccctacagttatgtggggttttcttgcgtttcatttatatctgaaatttaacagttatgtgtgctatattaacagtagaacctaagaagggcgggctttatccgtgttcttagaatatagacatgttgaaggagtttgtatttgaaatggctaaaaaagacttaaataacagctcagtattgctgaacttatatcataataaattattggtatccaaggttgatgaagccctagacgagggtaaaccttatgattttattattgctttttgtaaagagaaatttgactttgaaatcagtaaacccgcattatctcgttataaagaaaaacgcagagaggcaatcgaacagggtgtagaccttgaatccttacttgacaaaagacgaaaatctggtaaagttatagacctaaagggaaaagaggttgaaactctaccaaacacgaatacgtcttatgaccaaacatttaacgcagtagagcaaatttataatgacgttgaagtgttagacactatcattcaaaaaggctttgctagcttgaaagaagtcgattatgtagaagcacctcttgccatgaaagctatcgaggttaaagcaaaagttacaggtaatcaactgcaagggttaagtctagtgggattgcgtgaactaagattacgtcagtctgctaaagaacaagcaatgaccgaagttatcttacgttttatcccagaggaacaacacgaagaagtttaccaagcaattgaagaagcagaagcagagttctatgaaaacttagacctaacagcagaagatgcacgtatcactagcgcactcgaacaagcgggcatgaacattatctaagggggctattcaaatggcagaaaatctagtggaagtagactatagagggctgactttacaagaagcacttcaagcgctactagacaaaaaagtattactagtcaaaggactagaacaaagtcggaatttagacgtattgatacgtctttacaccgaaggagttgtacctgttactcaaatcagttatgatgttgttcctgctgatgggcattggagagaagaatactggcagatatttgatatatctgttaatgcactaagtacgtatccgtgttacgtgtacgatgcagaaacggctaataaagcacctaagttcctgattggaacaacagtttattacaccagtaagatggatagcactcgagattccgctatcgttattggattgtacaaagacgatgagggcaattggtattacaaattaagtagagaccaagaaatttacgcagagacagagcttacggcagacaggttgtaagcctgtctttttttgtaattaaagtgttgacaataaacaataagcatgatatacttatggtataaattaataaggagagattcatatgaaaaagaaaagatttatactaatgaagaattggaagagttgcttgcaaaactaccaaacgatgtcttatgtaaagaatatgatgcaatgacatacgacaggttttatgcttggggaaatgattcttgtgaacaagtgcaagagttattgagtaaacataagtataacttagattcaattcaattggttcacgacgtattttatgcactggaaaatttggtagaaggagaaatagaatatggaaataggtagttgacagtactagtactgtatgctaacatgtctatgtacaaaaaaaacaaatcaaggagagatgtacaaatgaaaccattcgaagacatttttgatgtgttgaacaaagcacgtcaagacaaagacaaggtaacacttacttttattgaagggctagacaatattgctagactccaaattgaggattcttctgctaccgcaggaacaactcgttatgtaaagttctacaacaatgacatccgtaagttccaatacgttgaccaagctgactttgaagaaatgtacgcaggcttagaaatgaaaacaggcaaaccaaaagaagaagcaatcgagtttccttccgaggaagtaggaattatcagtgctttaaaaatcttgcaacaaagtggtgtctttagtgatgaagacggaatgcgaactctaggaattaacacgtctacattgaaagatgctcactatatcttacagtatattgagcctgcaattgaccgttacttcgaatctttgaataaggatattgaagaattagaccgtgtaatgattaaccaatcagatgaacttaaacaaaaaatctgggaaagctttgtatttagcaaagataatctaagcaaaatgctagatgactttgaattggcaactctagacacgttcccaaatgtaccgtctaatttgattgttgatacttgttcagaagtgaagaaaactctcgaagggttattgattgaagatgcggaagaaaatcctattgaatgtcatgattaccttgttcgtggtttcgttggtgctgttatccgtattgaacaatttattatttctgttgcaacattatcttaccgtagaacagaattagaacttagagaatcaagagaagcttatatcaaagagcttgcttcaaatctatttatctttgcagaagctattgctcaggcgtatactagacttgtatgttctatcttaatggaaaattctattgatatgcacaatgcttctgagtatatccaagttatggaaacaaaagcggttcactgggtaaaagaagaagcactaggtggaactatgttagctaacaatgaggaagacctcgttgagttatcccaatctttaaactctatgacactagatgacgtacgtgaaacccaagaagaccctgaaaaggctgagtttaaagaagctttggaagaactgcttaatgagttgataggtgttttttcagaagacgaggacgaagaagaagaagttgacgaaacagaagacgaagatgaggaagaaataaaaaaaagccttgttagaatcattagaagcatttgaagacctgttacgttcaattcaagcccctactatggaagaagaggaagaagacaacgaggtacctttcgaaacacctatggtagacatggatgacctctttggacacttattatcaggggaacctaaagaaaaagaagaacctgtggagctttcagacgatgcaaaagcagagtttgaggaatactttgcagatgaaatcggtgagttacaagaacttcgtgaaaaagggaaagatgctgtagccttgtataataagattaatggggaactaccgttaaccgagataaaatcaatggctatgaaaaatatgggatttgcactgtcaactctgcaaaaaatgttagatagaacagagcttgactacactaagaggggtctacttgattccttagatagattaaaaggaagcaaatacaatttatttgtagaatatattgagtttttgagagaagcatataagttgtataaaacagtaggcatcggtattgttgcttacgcacatgcaattgttgaagatatagaaaatacggttgataacgtgatggacattgactatgaaactgcttaccttgttaagcttgcagttaaacagattaatcaagacattaaagcctttgaagaaaatgatggatactctgatttattagccttctctttagcatttacactcgttgttatcatgagagactatggagaaaccgacttaagtccaattagtgtagaggtagaagactttgtgtctaataaaaagccttccgttgttgtcgaagacgaagacgaggaagaaaaagaaggagctattgacttagctaaagagttgaaagacttgattcgtgggactgcattagacacagacaattctttaaacaatagtgtagacgaagaagccctgattactgattataagaatggtgtctctcaaagagaactcacaaaatgttataatataagtacagggaagttctactcaattctacgtagacatggtatcgcagtagacagctctaaagtagctaaaaaggttgcgcatgtagaagaaaacccggaagtactcgaacaggttcttagagattatatcgaaggtaaaacattagcttacatttactcaaactataatctatacaaaaacggtttgttctatctactagacaagtaccaaattccacgtagaaacaaacgttaacttccaaataactttaggcagtggctactatggtcactgcctttaataaggagaatatttgttggaagagacggtttataattttatacaaggcttaagcgggacacaattaactatattagaagatacatttgctttactaggactaatctttatacttataggaatacattttttagtagcagatacagttgaatgggtgaaacttgttaggaatccaagagtatctacatttgcaacaatacacatgtattttactttttatctaccgatgtttattttctttttggtagatggtagtacggttactacttttgttgtttcattactgatgtttgctattgtgtatacatggattgtctggcttcgagtgggtaggtacacagaaaactggtcagtagtacgtccatttgttacctatattaaagcacaagaccatgtatgtacgctaattattggttcagcacttttaagaacagtactatttttttataaagattaggataggttaagaataggataggatggaggataagatatatgaatgaaataatgagttatgtttggttgggtgtgtttattgctatacccctaattggctttatctacgtatataactacaatagaaaaaacccacgttggtaccttcgcaaaagctattgggcgccactagtgatagacttagttgtttttggtgtttggataatggtgggcgtaattatactagctgttggacatacagaaactactattaaaacatttaatattgaaccacttacggtttatagttcaccagaaaatgtttatgcaaagataggtagcacggatgacagctatgttaactttgcaattacaggtaagggaactcattctgcaccacttggtaacactagtatccattacgttgagtccgaaggtagaccgaaagtcacagttacttactacaaattagactcccctttctcagcctttatgggaatgcagggagaacttgtaactaaaaaaactcgtgtagatattcaagtacctgtaggtggggtggatgtcacaaatacaggtagtacctttgaagagcaatcagtaaatgatttacttagataattccctaagtagcgggctacaaaaatccgctaagtagcaggctagagacatcttttataggtgtctcttttttattgacaaacctgtacagctatgctaccatatacatgtaaataaaatgagctaaaaaatttgagcttacctattgacattaaacaatgtacaggctataataagtttgcaagataaaacgaaggaggaatttacaatggaaaaacaaaaacaagtaattacaagaaaacaatatgaggagattatggcacgttataacaaaatagactatgctatcattgcaggttttgttatctttggcacagtcatctttggtttttgggggatttgtatttatggctattgttggtgcgtttacgttcccacgtatgaaacaaaaaagcattaatttaatggaacaagactacattgttagagatgacattcaacagtaagcttaattgttgactatggaaattacaggtgttactataatggtacaaggaggacaaagaaatggcagaagcaaaaaagagctattctgacatgacagaggaggaagcacaatatgcaatggtattaggtgctagaatcgctcatgcacgagaagggttaggtattagtcaaggagaactaggtaagttagcaggtttcaatcaaacaactatctctttaattgagacaggtaaacggctacctaacttaaagacacttatcagattgagtaagattcttaaaaaagtttgaaaattacattggaatgaggtagagaaaataaaacagggggagatttattatgacaacgaaagtaaaagaaacaaaatcaaaagtaaagaatggtgaacgtacaccgaaggaatttgtagcagggatgaaacgtagtaagaaagacttgtcacaaacgcaagtggtaacctctttaatggaaaactatccagaacttacaccaaaagacatccaagaaattacaggtattaaacgtggaactatctatacaatccaaagtcgtctacgtagtgctcatcgtaaggaacatacaaagaccgcagatacgccacatatggataaggtagagtctattagtgaaaccatgagtccggaagctattggtaaacaagacttattcaatcgtttagctgatgtatacttaaagaagattgaagaaaccgaagatattgaagaagctagcaaatacaacatgttacttattcaagtaatggaaagtttagataaatgatagtagggttctttatatacaatttaagagtcctgattctaccgtatatttaacaggaatgtacggtagaattttatttacataaacctattgacattaaacaatagataagctattatatacatgtaagataaatacaagggagatgtttaaatgcaaacagcaactaaaaattttgaagttatacgtaagacagatgatttaatttattatcactttgcaaaggaaagcagttacgctatcaataaggcagataaacaagagtgggaagaggcaatgactgaatatgtgaatgactttcttgaacaggcttacggaaacatcccgcctatttcagtgtatatcaattctagactttctagaacattaggttggtttcaatattatttggaagacaatggtaaacctccgtatattgaagtaagtagcaggttagtaaaaagtgcgattctgctaacagatactgagcacaaggaacttgcatacacagtaattaacgacctgttaagacatgaagctattcactatgcgttgtatgtactagataaaccttctagcgatggagacgatacttttgaaaaagacttgtttgtaacagggacatcccctagcctaggtacaccagagtataaagtatataaaaacgagtttcctagattactatgtaaatactatgcaaagtgccctgtatgcgatactgtgcttgcttatgagaccagaggacgttactattgtattcatagatgtgtagaagaggggaaaacacatccagtcatctttagacctaagaatgaattaatcattggggtacagccccacgtatcttacgggagaaaactactggaaggaacatatgatggagcagttaaagaatcttacagaaaggggatagttaactaatggaagttaaaatagacttaacatcgggtacagctacagttatttttaatgatagtcctacagcaataatagaaaaatatcgtcattctatctcatatgatgaagtaagtaattaccgtaaaagagggcatacagtttactacgctaaccctgagtatcgagacccctacgtacttaaagataaagttgtaggttccaattggaaagaatacattgatagcatgaatgaattgcgggaacaaattactctagcagagaacataggtattacagtcacaaataaggaaagctatgaaaaagtatacaaacgagctttgaaacagtatgcacagttactagaaaaagaaaagcaagaaaataaacacagacgtttagttaagctactttcttctcaggactatgaaactttagtaactttaatagaaacagcttcttggcatctgttagaccactacgagtacgaacatgcaccaatcccaccgaaagagcaagctgttattgacataaaaactaagtgggatacaataagtaggctagagggataatatttccctctaaaatttaaacatatctattgacaataaacaatagtagagttatactatgtatgaagataaggaaagggagagatgaaaatgttaaactttaacaaacacgtaacagcagaagatattatcagagatggagaatacaatgatgcagtggtagaacatattattggagaacttgaaacaagtgatgagaagaaattaattctgttcaaacaatggattgcagacaaaaaagaagatggagacacggaagctgttgaatactttaaaggtatgacagacaaagaaattttagtttacatggacttagacgaaattgtagaatactatgaagaaacaggacttgcagactttgcagatagtttagacattgactggacaggtttactagaaagctttggagtagaatagggggaactgacttgaacgcagaaaataaaataagaagagggcgacctcgtaaatacccagagggagctaaacgagtagacaacacaagcttgatagtcacaaagaaacaaaaagaatacattggtagtatcgcaaagttaaacaaggaaacagtaaaagagacaagtaacaggctactaaaagaagttttagacggcaagtttgattacttgttaacacctattgcagaagaagatgtgccatctgtaccagtaacggtggataggaagttggcacatgaggtacaaaagtatttagagggttacaacgagaatgcttcggaagtactgaggaaaatggtggaggagtttatgattatgacagacaggacagtgaaagtggttggtggctacgaactgggagtgacttccattacaaaagagcttaaacgattctggttgaaacctacagaggaggcagaagaaaatatgttctttatggatgcttccattcaactagatgtggataaccgacatgtagttattcgtgaaaaatctatgggtgtccgctcaatcaatcaaatggaagagcttaaacgttacaaagaccaactgatagagacagcttcccaattacaggatgcactggatacttacgttgcgaaacatttaggataaacttttaggatataggataggataaacaggataggataggataggatttacttaggataggataggataggatgaaaggagacaggacataatgttaagtacagcagaatacgattcacttagagagtatttagtagccgtaattcataaccaaattagtgaggacgagagagacacgcaaagcttagatatatggaaagaagaggtcgataagctgacagtagacaattggagagaacgttgcatgaacctagcagatttgttatacgtagatactcccgcttcactggcagacatttacaaagactataaagaggagctaaacgaaatactcagagattacacagatgagttacgtgcaggagctacgttcaataaggtagctgacgagcgcctagggtggatgtgggaagattatgacccattaatactagaagcacataatcaaggtctagtagctcgtctagggcttataatcgttgctgaacaacttgccactcaattggagcaagggacgtttacaataccatatgataactaagtaacaggctagcctaagtagcaggctagcttttttcttctaagtaacaggttagctaaaatcttctaagtaacgggctacagtaaaaaaactctaagtagcaggctacaaaaattccctaagtagcgggctacaaacagcttataaaattccgaggcgtaccatccgacagccagatttgtcacctttgtccgttcgatatgccacaactcaaactcgctttttccttatatatagaagaaaaaaagtttttcatctttttagtgttttttattgacattaagaaataatcatgatatagtatagacagttaaagaaaggagaaacaaaaaaaataaataaaaaaatttaaaaaaagttattgacattaaacaataaacaagctataataaacatgtaagataaataagagaaaagaaagagagtgttaaaaatggaaaaacaaattattgtaaactttttgaaagagattgaaaaaaatattaaaatggtaaacagaggcttaaaatctgagaacgaaactcacagcgaacttgttggaatgtatgacggcattaagttggcaatgaaaacaatcaatcccgacacggtaaacattgacttgcattatacacgtacaatcatagaaaactattttttaggcactaatgaacaaaaagaaaatgccctagaagccttacaacttgcgttatcagtcgcaaaagactaacatataaaacggcgggacacgttcccgccttacataaaaaagttaaaaaatttttatgtttatctattgacaaaagacaataaacactatataataaacatgtaagataaagaaaggaggggaaaacatgaaaagcaaagtaaaagcctttttcatcgcaaggagggaaaagaaagaagtaaaagagattttacagacaagaaacaaggcaataaacgagcttaaaaatttaaataaaaaacttatacaaaactattgacaaaaagaaataaacactatataataaacatgtaagataaaacaaggaggaaaaagaaacatgcaaaagaaattatacaagaaaagagatttttataaaaagttggcttcattcgctgttatgtttttacttggttcagttgttacggcggtattttcgttcacagtgtcacttattatcggtttgactttattcatttttgcttttatgatttttgatgacttagattatacagtaagaaataaataaaaattttagtcaaaactattgacaataaacaataactattgtacaatgtatttgtaagataaataagagaggaattgataaaaatggaaaacacaaaaaaatatacattagagggcttgaaacaactagcaaaagaaagcgggtttgaaatcgaggaggtaaaaccaaaattacacgaggttaaccgttattattggagcggtagcatttacggcggttcagacttcattttcattgaccacgatttaaaaattattgtaacaggtaacacacgagcaacaaaaagcgatatgtatacaagaaataacacggaatgcaaacgaaaaagagacttgaacgaggaaaaagcttactatgaggggctagggtatcaagtatttaataatgaggctttctcttatgaggctttacgattattacagaatggaagtgttaaccgctcactaaataaagagtatagcttgcaagaattgcttgacatgaaagactaacatataaaacggcgggacacgttcccgccttacataaaaaagttaaaaatttttatgtttatctattgacaaaagacaataaacactatataataaacatgtaagataaataagaaagagggaattaaaaatgacaaaatacggaaaatttaaagcatacttttataatggatttgacaagccaaaattggtggcaactagtgttaccggacttttaagagatgttaccataacagacacgtatcaaggggacgtaacaaaagaaatgcggttagaagtgaaagcgtacaaagagggacaaaactcttttcaagaatttaaagagtatttacaagactttaatatctttatagacccaacttatttggaattaaaagaagcttcacggcaatggttcggaaacgataccccagaacaccatttcacggaatttagacaagcagaagcacaagcaaacaaagaggaaaacaaggcgctagcattggcaaacgtgacggaatacaaagacatgaccgactataaacaagactatgaaacactagaagaagcgcaaaccgattttaacgaaaaagtggaaaatggttttattcaaaatattacattagcaacgtataacggcgctacacaagaaagcacattttacgagctaacagacgaaaatattctagaagctatttatacagacttgcatgaaactgattcatatgatatgattcaagaaatagaagaaagcaccgacttgacaaaatgggactatatacgagcttatacagaaatttataacgtgttcacacttaacgggcttgtatacattgaaagagattaagggggacggtgtgacgatatgaaaccgaacaagaaactagaagcattaaaacgggctagaatggaaaaactagcccgtgagacaatcgagaagcctatagaatttatttacaacggtaactatacacaagaagaaatgtattatttcatggaagaacgaaaacgattgaaaggaattaaaaaacgagaataaaacagttgacaaagaaaaatatacatggtatagtatacatgtaaacaagagaaacacctattcagacgaactcaaaaaaaagagtataaaaaattttagtcaaaactattgacaaaaagaaataaacaagctataataaacatgtaagataaataagataaaagaaagagggaactaaaaatgacaactttaaaagaagcatacaacgaaattattgaaagcaacttaaacgaaccagaagaacgcaaaacatacttacaggacttaacacaacacggggcaattagcggaatggttggcggtttgatttactacagtgaaacaactcaattctttaatgaacaccgtgacgaaattcttgcaatgttacacgaattaaaagaagaaacggggctagacgaaaaagggctattcggtgacaagtggaacgattgggaagacttattagaagacgaagcggacgacttagacccgttagcagacacaaacaatcaaaatttactagcatggtttgcggtggaagaactagcaaagaaagaacttgacgaactagaagaagcatagcaaacacggcgggacgtgttcccgccttacataaaaaaagttaaaaaatttttatgtttatctattgacattaaacaatatagatgataatataaagacatagaaaggaagcataagaatgttagataaagaatatttacatcagcaactagaaagaagtttctaccctataaacgatattaaacgtttatcagtgctacacaagcaagagcttaacaacttaaagaaccatgtaagaaagggggctacaccggaacacgtagccaaacaattggaagaactaacaaaagaaatgaacgagctttctaaccttgcgtgttcattagagttatatgttagaagtgtaaagaaccaactagggaacgaactaggcaaaaacgtaaacaaacacgaataaaaaaaatttaaaaaaagttattgacattaaacaataaacaagttataataaaggtgtaaggtaaagaaaggaagtaataaaaatgagtaaaacagttgaaacagttattacattgatgaaaagagcagaaaagaaaggcgtagcaatcaaacgagcaagacaacgggacatgtggggcgtaggagaattgcaagaagtttatcgagtagaaaacaatggtaaaacagtaagcttataccactatgaaacactaaccgcaaaagttgaccttgaaaacatgcaactaatagaggtatacggggaaagccgttctgatagtgatagcgtggcaactttcttatctgaattaggtttcaaaaattttgactttggttttaaaccagtaaacgggggcttttggttattcactaacaaagacggggaaagacaagaaacctatctagacgaacaaggagaaaccgccgttataaatgaatttaatcgggtacaggcataacaaaagaaagagggggaaacctctctttctaaaataaaaaattttaaacttttctattgacaataaacaataaggataatataatactagtgaggaatgataaaaatgcaaatcgaaattatcgaacctaaaaaagaatttaaatttttaactagggaggaacttaacacctatcaattagaagcgggggaacttgtggaactaacttatatagtaaactacacaaaagaaacgcctaaagaattgacaagtgttttcatgtttgcggataccatcggggcaagctcgtatcttgtagacgtagaaacgggcataatgacaaagacacaaacaaaaaacccgctttctaactgtaatctagctataacaaaagtagactttttcaaaacaagcaaacttatactagaaaggaaagaaaactaatgaatttaaaagagtggggctatacatgggacggcatgaaagaaattacacgggaacaagcaaagaaacaatacaaggaaaaagaaacatttattctatatagtgatgacacagaaagccttatcgagtcagaggaacaatttaatataaagggcgttcgttacggtgtggaaaaggagggggaacaatgaacaaatttctagaagaaagaaaatcagacttgcttattcaacaaaaagaacaagctcaaaccttattacactatatagaggaaaacaaagaaccagaccaaaccatcatacaaagacaaacaaacaggcttaacaggttaagcgctcaaatatacgaaattaaaatgatacaaagaaaactaaaaagaatataaggagaaaacagacatggaaacagtaaaagacattaaaagaatgataggaacactaaaagaggatataaagcataaagaaagctatataaaggaattagacgaacaaggaagaatgatagagtcagaactattgaaagcagaagtaaaaggaatgagggacgttatacgggacatagaacaagctatatactagaaggaggggaaaacatgaaagaagttaagcttattcaattagacaagaaagaaatagatagttatcatacatggggcatatttgacacaacggaaccaatagaagacggggacagaatttctatatatgaccataaaacgggggcgttttacttatagacgttataacagtaatcaaggaaacagaaggctatttctttcttattatagaggaatagagagagaggaaaagaagaaaaagagcagagaacccaaaaaccaaaaaaaaagaccttagagcctgagattttcaaaacccgagcttttcggaacccgcttataagggcgcacactgtttttctatcattctagcacaaacaggaagctagagggcacacaatagccctaggaagccacaggaagcccttagagcggttttacatagatttatatagaattatccataaataaacagaactattctagaatgctttaaaatagcttaaaataaattgaaatatttaatagtttatacttgcatttcatctctttacatggtatagtatagatagttaaaagagagcttcattattcggacgagaaacaaaataaaaaagttgagtttaatgcttgacaaggtaaactatacatgttaatataaaggtgtggttagggttaaaccttacaggaaaacgagcacgaccacacaaacaaaaaaaatttaaacaaatctattgacattaaacaataaacaagctataataaaggtgtaaggtaaagagagggaggaaacgacatggaatacaacacactagacgaattattggacagtaaagaatttaaggacttcatggacgaactagaggacgatggattttttgaccaattcgaggatgaagaagacgggaacacactagcagacacgggacgttatccagaataagggaggggcttaacaatgaaagcaattataattaaacagcttaaggacggttacaaaggcattctagcacgtaaggaaaacggttggacaaaagaggaactaatcaattttacagcaggcgtaagcaatacactatttgaccttatcaatgatttacagggcgggggctttattacagacaaggaagcggaggaaatagaggaggtattttctaacactatcgacacactagaattttagactaatctattgacaataaacaataaaaataatataatactagtgagggggctttttccctctcactcacacaagaaagggactgactaaaatggaaaatgtaaaaattgcaatgaaagctatccaagaagaaataaacgaaactactctaattataacggcatataagagaccgccacagtggtttattgaccatctagaccgattacagaaagcacacctttcactacaagacgtagcaagacaaatgccagaaattacagaaagcgaggttaactaataatgaccaagcaactaatgaaagaagcgcttgactacctagagaaagagggaaaacaaatcactagaaaacacgttacacagtacggctttaccatgtatgaacatcctaccttttcaagtgcggttattatggtaaaagatggtaaaattgtaggacaaacaaacaaagctaaaatactagcagacaacagcagaacacgggaaaaattagaaacatctgattttatagaatttacactataataaaacagcatataaagcccgtagcgaggttttaacgggctttatatataaataccttaaggagggcttacaagtgcttacagtggaaaacaagggcgttaggtggctagtgagtaaagaagcatggcgggcgggctttgctatagaggtgctaggcttgccagattgtaaaattagtacagtattaaaagcgggctataaaattattatttaattatttaatcttttctattgacaataaacaataactttggtattctatatatgtaagataaatgaagggaattgataagaatgaaaaatctaatgaatgaaacaatctatagtaatattacattaaacctaactaagaaggcgcaaggcattatatcccaatatgtagaccataacgaaggctatccaagacaaaagaatagaggtcactactaccgctatacagttacgtttatcaatggtgaaacgtttgaaagtaatagcaaggcggacatcgctcattatatttcatctatgacagcggacgaactagaaaccatcatcaaggaagcacaagccgagcagtaagaaataggtatataccagttaaccccaccccgtggttttgtgaccgtatttaggggcggggctatcagggcagggcgcaccctcgggtacctatttttttggactggaaatttttttagaaatttggaaagtcaacactaaaagtcaacaccttacactaaccccaccccgttgttttctctagtcgatttcttctatctgagtgtttaatagatacatagtaccacccacacccgtaccctctagaacgatacactccaagaacattatcctaggggcactgacatcctctaaggaactaacttctccatttaagacatccgcaccgaccacctgcactacatgtcctaatactgtcctgtattccttacctattactacttgttctaccatagtgctttcctccttataaagaccccaccccgttgatgaggatgaggtctttttgttaattcttacgtacaaccatttcctctgcatagggtacaaaatctggttcatgcctatacaggtcatataagtacgcctctaatgaagattggacaagcgccttgactacatccataggctctcccctccagtagacttcttcatcatagattgcttgtgtgtcactatatctcacagttgcacgtatacagggtttaccattaataagggtgtcgtccttaaggtttatgtcgaaccctctatatgtgtaatatctgtatcgtttcttcatgctaatgctcctaactactaaaatttaagtgtgtcttttaataaccatatagtagtaactcgagtacctttatgattccctgtaacgaaacagaactgtgcagactttccttcatagataccgtcctctacgtgatgtaaggcttctgtaacacctaagtcatcaagccctaagtattctagattatgttcaatcgtaccaatttctacagcgaagtggttagctcgaatacccatccataggttatctgcttctgtatgggaataaatctcttctgcatggaaccctccaagaataaccattaggctttcttcgtctacgataccttgaagtgtaatagtagaccgattgccttgcatgataatcttacctatatactttgcaccctctaagcgttcttcccagttttcttgttttttgttttccatttgttcttcctccttaaaatttattacattctctctatttgtctgaaattgattatttgcagaataaatgtagcaattagcactagtatcccgactgcgcatagtataataacgagccaaggcgtaggtctacttgcttcatttgttaactcccagtatactccatatccgagtgcataggaagcaaataagaggagtgcccctcgattgttaataaaacatagattagatacttcatttaatcttcctccactataaatcttgctttagcctttaatggtgcgtagtccttttctgttagtcttacataagcaacacccggcactcccggagagcatacgtaagcaactacaccccagtctttgacttcacttactgtggcaaaacatcccccaaatgtttcatcgaaatgtgggactatttgaacaacatcatataactctgtgtgatacttcatttaatcttcctccgtacttaatgggtcttgtaggtagaagtcggagattccccatttgtttatataagtaatttctccttctttactacctgtcacctgttttaacttgtatgtgatttcttccccgtcttcacgagagtttccgtctttgtctattacgaacagtggagtcttctctgtgtctaatagttcgtaacgctcacctgttagcttgtgtatataaatcatgttatccctcctttagaacaatgcacatataaatacaatcaccgtagttttcactgtcatatgtgatatagtctacttcatagtctagtaattgttctgggaaatcttttgagtaaaactctgtacgccatgactgttctgcgcaatagggttccccgtcaaagtctttaatatagattcggaaagagtcaccaactgataagatgtctctaacttgtctaagtgttaatttcaaatgtcttgcacctccggttctgtgatgtctaggacagctattacttgtacctgtcctactccttctatatataatggtgtaaataaaccagttaactcgactaagttatcatgcctaatcgtgatagcattaaacttgtaattacacccataaataacttcatagatgcccataaaaaccctcctgtaatttatacttaaagtatatcacttagagggttaattgtcaataccaagcaggcaaagattgttcataattgaaagaccaaccactagagtttaaaacttctcctatctcgtttacactctttgctttcataatcttctttctagcatcaaggtgttctttccttgttatactactatataaggtttctcctaaccttataagaagttcttctttaaactttttgaaggtgtatccttcgtaatagtctgcccattcccatgtaatactttgtgttcccttaaatactttactgaaccctgatatggttatggtgtatttgattgtcattggtagttccttcatcgtcttatctcctatacccatgaaatcttcctgttttgttgtggacgaaatacctctactttacgtgtatgaatgtccctacctataatagcgtaaggactataatctattacttcatacaaacgtacagtgtagaggtgttcttcccgtataaagctactagcttctgcaatactgaaaaccttgttaacaatgcgtactgccttcattacacaccattgtacctttcttgctcttcatagatagccatgtcttcttgtagttcgacttctctgtctatacatttataacaggtttcaaaggtgtagtcgaagtcacaatctaattcactcactagtcttccacaactagcacaacgtacctcattttccattactttgcactcccaatatattgaacaaaataatttgagccttttttagctaaagtaaacatagctgtaacttctccttgttctattacttcatgagtaattaagtctactaagttaatactactcatatttgcaataaaagcctctccacaaggatgcccctctacaagtatatgtgctcctgatgctgaacgacccctataagagtctaggatacgaatgtgtcctttaaaatctaccttttcaattacttggtatttttcggggtagtgttcaatataagcatccccatattcaagtaaccgccaatcagttaaccctcttgctttatctggtacccaaatattgtctaatctttctaaataataggttactgccattgtttctcctccttgttaggtattactcccataggaatatatcgtttcttataacaaaaatgtcttctagcggagtattataatgcaactctacattatgattctctttcatgtaggtttttgcataatcaaataaatgctctggacacttaaaactaaatgaaccgccatctgcatctttgcaagctatatgctcttccatagtactattgacaaaccagtttacacactttggtggataacctagcataattcctagtgcataatcttttccgtgttttcctgataatttagagaactcagctagttgttccaatttagaaacaacaagtatgccatttttgcctacagaagttgcaaaatgctcccgtacaacacgtttaagttctggtgtcccaataaagatggtatctcttagtcccaaattaaatgccacagtttcttctgctaaaataaccatgataatctctcctcctatacctaattactcttttgatagtttgcttcttctaattgtcctccactatttcgctttaaaattatatacaggtttgacaatcttttgaatatctactgtatctttgatgatttctttgatttcgtcagcattcttgtatgcttttggtgcttcgtctagtgtactttgaacaacagatgttgtatagataccagacattgtttgtttaaactcatctaagtcaagcagttcttttgctttagaacgagacaatacacgccctgctccatgaggtgcagaattattccaatcagtgtttccttttcctacaccaatgatagagccttctttcatgtttaaaggaataacaagtctaacaccctcctgtgcatctgtggcacctttacgaatagtgttggaggctacatcaatataattatgaatagagtcaaatgagtcaactacagtccaacccatattagaaacaatcttatcaatgatagttttacgattcatgtaagcataacgttgtgctagttgcatatcatttaaatagtcatccactgcggaaccttctaagtatggcaattgtggtttaacattgacagctttaaaattcttaatagcctcttggatttctgactgtctgccttcttgcttaagtgtctcaatcatagttgctaaacctttgtcatcacgttcatggtataaatccgctttcttctggtgatatcgggctactttaagtcctaaagaacgggaacctgtatgaactaacaagtagtaattgttttcgtcatctttacttaattcgataaaatggtttccaccacctaaagtacctaaagataaggtaacacgttcaataaatggttcttctgttgcacctttaaacgtcatagattctaacatgtgcttaatcgtattcggtacagtaggatgaagttcgtccaaattttctctaatgttaaacccagaaggaaccactttgttaatcactgcatccaatttagcccattcggtatctgtcgtgtcttctggcttctcaatttgagctaccataataccacaacctacatctacaccaacaatagagggtacaactcgtttaataccgtctggataatgaatcgttgtaccaactgtagagcctttaccataatgtgcatctggcataattctaacaatgccaccgtctgttaccggttcattaatcattgttgtaacctgaccgatagtgccttcatcgactgtattaataaacattttcgcatcggtatacttaccgttaagttcaattaagttattcatcaattttctcccccactaatactttcttcatcttttcatctagtctctgtataatctcttgttgttcctgagctagctttgcatggtgttcacgctgttttttatacttagcataagcaaatagttcttctgtagttagttcttctaatttacgtgtaaatggtgtagcttcaaattccattacaagtacctccttgttttttatacttaaagtatatcatgtaagataaaaagaagcaagcagtttttacactacttgctatattttttaaacaaattcttctcttacttctccccaactttggtctgggtctggtaagctaaaaggtagtttctcctgttcttccttagataagccctgataacatttctcatgtactgcaatggttccagaactaccctgagcaacgggtaacgcactaatcaattcccccatagcttccctaaactttttatagtcttcgtcatcagcgttatcgactaggacatacacatcgcattctgctttacgtgcatttgcaatgtttttcctcactaggagcatcatagaaattttttctttgtaattcaagatacttaactgctttaattagtcttttagcatagtttttagctatcgggtcaacatcaataccattttgtaaatattctactaattgatacttcgcatcccctgatgagataccgaatagagataagcaacttgtagataaaatatctccacttggaagtatcttgttagaaccaaaatggtgagaatccgccctaccaaactctgaatcacatatttcagaatgactattggggtttggagtaccatccactttacggtcttcccctctatagtccttatcttccataacaccaccatactcgttgtagtgtcctacagtttctccaattaactttccctgtctgacatgttttaaccgacaaagttccccaccattaaagcagtcacccacaatctgggtattacatactggacaaatatagccgaaacaccccattattcttcctccattttctctttaatcatatctagaacttcttctttgttacggtgtggtatattgaataaatcaagaatatcttgttcaatacggtcttggtgcgctcgtgcattaataaccttatcatattcattaactagctctgtgtatttagccaaatcctctgaacttagtttgtttaagtccaaatcctctttagtaggtactggtctaagactgaaatagtttacacagacagtaacatccttacttgcagaacagcgaattttgtcaaacacatccaatttttccaattcgtctggttggtcaatataaacatatatagaagggataccttctgggttccatcttatctcatgttccgtctctgggtatttaactttcgcaattacatactttctgccaacagacactacagcagaacccgcagtagcataatcgtttcctaccacccaatccttaaaatcttcaagagaacctaaacccgaaggataatgcttaatcattagcatagggtcaattacttcaacaacatcaccttctctaaatttaaaaacatcaaatgtaaccggtttccgactaacctcataaccaaattttttagcaaaaaacaaatcctgagaataatcttttgcttcataatatctcacaaaatcaaaacaattttcaactgatgctctcatgtcctaaccctcccacaagttgaagctcttcatttttaaagaagacttccctagctttttctatttgttctagtatacgtacagcttgtgatgcgccaccaaaaccattattgatattcacaacagagataccagaagtgcaactagttagtgcagtatttaacgctgtgtagccatctgctgaaataccgtaacctgttgaagttggtacagcaataataggtaaatcaattaaacctgcaaggactacaggcaatgctccctcaaagccttgtacagatactaccgcattactctttgtaatagcatctgtagaagccattagttttttcaagtcatttacaccaatatcatgaaacgacacaggaacatatccatttaaaagtacggttaaataagcttcgtctacggtgtctctatcagctacacccgcagatgtaattgccacagataggtcactctctgtagggtttgcacgataaaacgctgtctgactagacttgcaatacacaaaaggacttccttctccccaattatctacccaatctggttcctctagttcctctgctttttctataatttccccccaagagagaacctgtgatgtttcaaaaggtagtgcgtagaacacgtctaaaggtaattttgttaccatgatatttgtatctgcgggtacctctgcaatctgactggctagttcctgtgcagttttatttccaccaaatagtgtacgtaatttcattagttaatctcctctaaaaatttagttttgtctactggttctatcgttccatcttcctcgattccttgaactttgaatagtaagaactctggcatcgcacagacaacagcagggtcatatgctgtttccgggtcacatgccatctcaaacatgttagtgtctttgttatagaaaaaacataagtccccgattctttcatctgggtataaaaagtcagcaatgtaaaacgccatgtatttcatactagtttcctcctgttattttattgtatagtttagtaagaaatccaatctttttattgctaggttcagttaccaaccatgttattgttagtgatttaattcgtggagccaaagcattttgcagataagttacatagtcattctcttggacagatactgaatagccctttcctattaaaaatcggttaactgcctctacctcctgcttgttaatattaatgtcagagataacacaccagtattgccctagctccactgcttccttaatactaggtagtaccttatttttaataaagtctacggaattttggactaactcttcttcgatttcctgttctttttcaacagtcttattataagcctcctctgctgacatcattatgcaccaactccaatttcttcatctagctttaaggatttaatcttattactaaacatgttagcttgctcattataatgtaaagctaacaacatcttaatgttattttcaaactcagatgcttttgaatctacatatgcttcccgcactagtgaatacattgtgatgttatctttacagaatgcccaaagaggcgtatccaactcactttttagcacacgagttttaaacagatagtctggctctttactgcggttctcaatttgcttttctgtaattttcaagtcttcttctcggattttcattacacgagtggtacatgtaaagtctccttcggttacttccgatggtctaacatctactcgtacaccaactaaatataaagaatcctctcttgaaatgtatacaggttctatgtccacaatcttagtgaatgggcactcgtaaccattcttagcaaaccaatctgtaattaaggactgtaactcatcttgcttatcttctggaatttcatctgttaggtagtagtcctctgcaacttccccaacttcttcatagaccatctcttgtgtacgttccaagaatgaatcaacatctacagggagataaaccggagccactcttccaactacaaaactattgattggttcttttggtagaaatcctaaaatatcctctacgtgttcccagatttcctctacaaaagttttcccatctctaatggcatctacggctagtttacctgcatgaatagcctcttccttggtatcgaaataagcacaagctctccaaacttctacatctgtatcacttgcacacatccattttcctactaaagactcattactcattttttctttcctcccattttatccttatctagaccccatatatgtgcccatttacgacaaaagtgtttatcataatctaagtccataccggtagcaccttcgaagtctttaaactcttcataaaattccgattctttaaactcatcccactttttcaattcaaccatcctatacataagttggtcaaattgatagtctggtattttaattgcatctaattcataatacagataactgtgtagtaataaagcacgctctgtcatatttataaaggacaggttatctagtatagtattatttacaacggtcacttgttactccccggaattgaaattattacttctatatctaacacagccataatcttaaacaaggacggtaagctaattacagttaacccgttttcatatgtagaaatggctttttgtgtaatgcctgcctttgtagctaatgcacgttgagatagaccttgttcttctcgtgcactatgaatatatcctcgtaatgtatcagataaggcacgtgtgtattcttctgtatcatccttattaacacccagttcagcaactgtttcagttaaattgattttcatgttttctcccccttgcctttctatactcatagtatatcagatacctttcagtacgtcaacaactttaaataaaaaaatcctagtaaatactaggattttttctctctttgtattgcatctgcaagcatctcactaaagcaggttcctccattatagaaagtaaacaaaaagttatacatgtctggctcaccttccacaggagtaagcacggacacttcatcattatctaaaatagtttgttcgaccgcatgataaaggtcatcccctactttgacatagctatcgtaattctcttctaaaaaccattccatgtcactatcatagtaactaggtcgttctcctctactttgtgtaaataagctaactgctttatactgttctgcctctgtaagcttacgtaccttacctacacgtgtttccatttctgacattatattcgctccttaaatatggtcttcatctttaaatgtttcataagaatagtgcacctgcgttctaacataaaagaccttattacagcttggacaagttgtttcccaaattgccccctccttcacattctctgagctatagattccagagtgatacaggtcttcctcgtctttcatagtttccttacaaaatggacaagtaggatatagttccttctcttctataatgtatcctttatacatagggactcctcctacttaaacgcttcgtctaaatcaagttcacgttttgcgatttcagtgatttcttcaatggcttcttggtattctcggatagttgtaatctctttaccatttcctcctaagacccaatgacgttgaatcatgtgtaaagcttttgtaaggttcgtttggtaaccgacaagcgcaacattctcgtttccttttttgtcgtaagtgatttctcctttgtcgttacgaactacacgttttacagttacgttgtctgcatcactagtaatgcggtagtctaatactttcatgtttagcattatttgtctcttcctttcattcgttggtttcctgtacgaggtttaaatttacgtggtaaaacacgggtattgcgtttagcttcattatatttacgtttaagccgaacctttctgtctgactgatgttcaaacatgtctgcaagagcggagcagtaatcaatctctgcacgtactttttctcccacatatctttctaaatagaatacatcaagagctactttactatagtcaatgtcatatcgactaatagtaacaatgcgctcaactgtgtatctatcacaaatagagaatcgtaagtaaattattaactggtcaaatcttaagtcataatagagtggtttaggatagtccaacttaatacggttatctatttcgtataggtgttcttttgtatagtctaacagagcaataattcgattgtctgtttcattcatttctaacgtcataccttcgtcctttccggtgtgcattgatagagtctacgggtacatgttttagctgaaagcttacttagttagactcggataaaagcctcttacctagacctgtccgctaacagcggaggacattatctaggtaagggctaaggataaacacaccctatacataccgttaatgtgacacgcccggttcgttactgtcttaaaataaggtctgttggtagtactgagtagcgtttttcatccactgggtttaacccatctttgccgagaactgccactacaagtttgtcttcatcgtatcctgtaactaccaagttagcccccattagttgttcatttcttgcataaagtcctgccggtgaatagagaacccaatccccaatgttaaatacccctttaaggtacttaccacacattggacagtacttaataaatgttctagcctctgcggtcattgtcgtacgaacattcccataactgtgaaaactaaactgtgcacgcaatacattatggtctacacctataccaataccgcctgattcgtcctctaaattataaagtaattctccaccctcacaccaattacacatgttgctcctccttcgctttttggatttcactttgtaaaaaattaatgtaccttggattttctatattaaacatatcctgaacatatacggctcctagttctctacgatacgcatagtccataccaatacgtctatagaactcatggttaacatgatacataaactgatggaatcttgtatgctgtcctcttaaatcatacagctcctgtaataggtcacagatttgtacaaattcttcctttgttccacttgccatgatttatctcctccttacctgttacctaaagtatatcaaaacccagagcatctgtcaacactctgggtaacttttttattgtacagataataaggaagctacgttaatgtaagtaatcaaacctttttctacgtcctgtacaattgggtactctgctttgtcttcatacatgatgttatctcgtacatatagcatctctgattcaacataacggaagatagcatctgaactacccgttgttgctaatcgtatccgtttcttatccgtagggtttgctatgactgcctgatttttacttagcttacataacaacttaaacattcttgtaatgttttcatcttctaaagccggagaagatgttgttttcttcttcaatcgttgttccatataaattggaattgcttgtgcagataacttcatcgtagtatcactatttaagaagtactctgtagtagttaaaacaacctttgattgttctaaaaacttaagctgtaaatagcatcgcaaatcatcttctgagaatgatttttggtattttgaatggtctgcatttatccattctacgatgctacttaagaaggttacaggtctcttaccagaataagaaatactaatatagtcagatgtatttactatctcttttgcgcaagagatttcatatatggtagccccctctaggtcactgtcttcaccgataaaaatagtagttaaaaagctacttgggacaaatcctacatggataaattcttgggtttctggtagatgtgactcaataaaactacctaaaagttctttccacaagaactgctcgtccttgactagtgcttccttcttttgaagtttatagaacaaaaggtcaaacgcagtataccaatcttcggaaatttttagtttagttaattcttcatctactggaacatcaatagtatcagacgtgtcttcctcaacttccgtgctatctaaatcattatcccataaatcaaatgttttacggagacaaaactctctccataatgtatcactcgggtcttctccatattgcaataacatctgctttccaattgaagttaatgtaactttacctcgactattggtgccctcgttataatcttgaatacaccctttataccgcaaagaaagtaacatagtgttcgttgctttatcttcaataagttttaatatttgtttatagccatactccatatagaaaacagggaagttcttttgctcaacaaaagcttcgtgctccacctctaacccacgtttttgtcttccgagtttatcaattatacgaagcgcctctaattctcgttcctcaatagtcacaacatactgactgattttgttttcgtaagctaaagcggtattcatctcttgcaaaatctgtttaaataaatcgtttgcatcttttgccttctgagtcttaaatgttctgattgtcgtatcatagaaacgttcgtgactcgaaatagcgaactgcccaatatatcgtttaccttttaaatttaaacggttttcgttacgattccctagagtaaacgttacgtagacagactcactagacttagaaaaataaatatcttgaacaactatgccgatagtttcaagctcgtttatacgtttagtaaaatcactctcatattgtggtctgtttatatttttgcagtgctttctatagtgtactgcaacagttttcgattcttttgccacatccaattacctctcttatctttcttcttttgcaacgtatgcttctaatacaatagttctaatcggtgcttcttcatgtacttcatcttttaccttcttgattacaccttctcttagcagtccttctcctaacttatgtgaagcttctagcattcgtaagtttacaagctcatcactgtcaaatatacttacatctaagcttactctgtaaggtaatacttgttggtatacacgggtgactgttaggggttccccctataagaggactcttcccaactctagaaaatgcccagttatctagtttttggttaaaacgcttctttaatctgtctaacatgttttcacctccatgtatatagtatacatgttaagccttacaaaagtcaacaataaaataaaaaaaaacatacaactaagtatgttttttcggtacaaaatatttctcttgaatattaccgtctttatctacaacaacgccatttaactgtcctccataggcacaagcaccatcaataaagactgtacggtctcctaaataaatatcacagttattgcctctatgaaagttaactgtaggtgtatgtcctacaataatagttttacttgtttcgttcttttggaatggatttggtctagtccaaagcatttcatgttcctctgctgttttccagtctggctgtctccatcttgggatacctccatgcacaaatagcacgttaccgaactcgtagtaaggttctaggagttccaaggtgtcttttacattagagttattaagaagctctgtacgcaacgctagggcgctaagagaagctgtcttagttcctagaatagaattagcagtctcttgacctccttgataataccacactgagtatatctcttgcaagtcctcataatctggttctaatcttaatgggaaactaaggaaatctaatagcatttggtcatggttccctttaattgctgtgccaccagaagccatgtgctcgtaaacaaaccctagaacttcttttgattggagacctctgtctacatagtctcctaaaagaaccaattcttgttcttcacgattccaatattttaataactccataaactcatcgtacataccatgtatatctgatactacgaacgctttctctttgctcattaatcgtcctctactttctcaaaatatcgaaagaacgcataccaatcatatcgttcagtaacctgcttactctcgtacataaatgtaaactcaacgtatttgtgtttaactgcatgagggtctattggttcccatggaagcctgcgagggtaatcatagtaaactcttgttggaatgacttctcgcattaataatttagggtaccgctttttagggcggtacctctttcctaaaacatgttcgtatgtcggtctcattctattgtaccatgtttcgtataagttaagccggactcattgaaacgcttttccttttcttcaatcaggtcaatacattctttaattgtgtatggtgtgccaaatggatgtaaagttaattccggtgagtcaatacctacatttagtaaattaggttcttgataagccatttcgtggatgtgtccatgtaagtttactcgatttcctcgactaccaataataagtggatagtgcgttaaatggatgatttttctttcttgctttagtattacgcctacatcactccaaaatactcgttcacgtaattcctcatcccgattaattgtttttaaaagcttggtactgtcgtggttccctttaaccatgataatggtaccgtttagcttacgaagaatctctagggtatcctttggtttctggttcatagcaaagtcccctagatggtacacagtatcttccggacgaactcgtttattccatgtcttgattaagtaatcgttcatttcgtccacatcagcaaacctacgccttgtctctacaaaaccatcttctccacaaatattgtgatggttgaagtgcatgtctgaaattacgtatgttttcattctagtaaccctcccaattcaaagttatcgaaacactctgcattgtatacattttgaatggcatttcgatagaactctacagtctctagactaactggggtgaagttgtgtacgtctactcctacattaagtccgtcacgtttcaccttttgtttttcatgaatatgcccaaataagccaaaatatccatctttgattttgtcttctgaataactcatatgggaaggctcatggacaagaactaatttttggtctacaagagtgacaacttctccttttcgaacaaattcaaaatatttttcttgttccggagtaataaacccgcctttaccatcccgttcatagttaccaaataataaatgaattttacctttaagctgtttagctacttcgaagttaccgaaatctcctaaatggtaaacggtgtcctcttcatctacaacatcgttccaccgttctatcatagctaaatcagcatgttctacattatcaaaatacatacctcgcatggagtatttgaaagtacgttcttgtccaaagtgtgtgtcggacgtaaaccaaatcttactcatttacatcatctccaaacgttcataacatttttttaattaccaaggcatcccacattgcattatgttttacaccctccattgtttcatcattaccaagaaggaacgcaaactcttcacgagaaatatcagggtcaacgcctttaatcttaaataacgtgcaaatgtcaaagggaatatagtacacgttactgggtatagagagcgcatccccaaataggtggttgaacaacacccaatcgtatgaaagacagtctgaccatacttctacagaattaaactgcgctagccattcctgtagtttttgtgcgatatattccgtgtctccatagtactgattttcttcttctcgtaggttttcttcccctactaaattatcaagcacatgcgcctgtaaccattcgtctacttgtgtttcatcgtaatcgtttaactctgcataaaatgatacaccattttcagctataattccaatactaattagtgtagtgtctttatgcaatcctgtaaactctgtgtcaaaaaagattttcatgtcttactcctctatgcaatttaattatgattatgttgtgactattaatagaactagcaattgaaggtaatgaactgtttggtcaattgttaattgtgtttttgggtctggtactattgaaggaaaccatgtactttgtgctttgagatagtccattacaaagtgcggtaaccatagaacaagtaaaatgtgtgctaatgtaatagacaaaccaattaggtgacctgtcatagcaattgtaaaagtccaaatagttgcatggataaataacacgtataggtctcttgttttttctcttgcaatatattcactttgtagtgcatagtctcctacagcatgtgctcctactaacataacaaacatagtaatatatggtgtcattgttgttcctccctgcaatctttatagccctctcgataagctctaagccagcttttaagttcattcatatctgatgaaaggctaattctgtttagtacagtgctaattggtattttaatgtcttcggttacttctggttcaaacgctttgtataatagctcattgaaccagttttgaccccaccatttgcctgcttcatcttttataaaatagttgcgcccagtacattctatagggtaacattctcctttaataaataatgtactacttccatacataaatgtctttttacacaacagatatttatgttcctttagtttaatcaattatttttcctccgtatgcttaggctcgttatcttcaattagtttagtaagcggtacatattctattgttcttctaagaactatgtcctccgcttcttcatttgtatctagccaacgtttagtgccatcactcatccaaataagacgtaatgggtatcccatttcatcatattgtatggtatttgttctttcgtatacgtaaggctctggcttctttttataaagttaaaccagttcattcctgcacctcttcataagtgtctgcaaagatgtctggtttacatggataaacttcaccttgaacaccttgaatgatgtagtctcccacagaaacgtgcatccaaccttcaagtgttttaatataaagttctccttcttcaaaactataatctgcatttaatagccattctgggacatagtagtttcctgtggaatccataaaatctccatcaaatttaaatgcctcaattactactggtttctttctgtacttcatatgttacctccgtatttactatattttgtagtataaaagatacttctataccacgaaagtctttgtgtggcttagttcgtatacttttatattcaactgcttgttcaatactttttagcatatgtttggcataactacctacaaacatataatacctaccatctattgtatatacacgtagtattttcttagtttttgtcattgatagcaccttcaatgtattttaattcacgcatcaacttaataaaagaagcagtgtctaaaataattgacatgtcatcgcttctatcttgtatagtaatttctaccactgtatcttcttcgtcaagactacgacggtcttcctcataagttactttaacgctactgataacgccatcatcactatacaatgcgtaatacctatttgtacttatttccactccaatcaacccctttcttttattggtctagttccgtttccttgcacttttgttcctctatatttaatagcacagtcagcgtgctgtagtctccaataaccattctttctttcgaaatgtccttgacctttctctacaaaggtaccgcacctgtagcaataacccggatacttgttgcgcataatagtctcccctttacacaagttctaacgaaatacttagtataccagaatatttatcttttacagcttcctctacttggttaactgcttcttccagtgaaatagtcgtatttgtatcctcggaataagtcttagctaaaatccgtattgcatgaacttgggaaacctcttttagttcaacagaggtattgtcttcgtcatccacataagcttgctctttgtatatctctaaagctttgctaggactataggctgatatgagagcaaaataaggactagttacttcatagaacttaattcctgttaagttaaagaaaggtgttacgtagtccattacgcctttttgcatacgtaactcacttgaatgttctaggttgttatagtgctctttttctactacgacaacctcgactactttacctttttccacttcatttggggtacatagtctatctctagctccaagataactacacattagtgcatctttaactatcgttccggaagcagtattataccctgttttataaaacccatcttcccttactgcaacatataattttaacggctcactcatactagttttcctcctctgtaatagtatcatagaaaatcatcccaaccgactcccacgctacgcataaaacaagacttattacatagtaagtatcttttatgatactcatttttaaaactcagagtgcttccgcactctgaacaatataacttcacttttttgtctgggtatccatcgttgagtatctcctgcttaaatctcttaattccttgtcgtctattcatctataacctcttttccactggtacagcaaacgcccataaatctgcattaatttcttttatctcccgctctgtaaaactattcttccaagttctacaatgcttgttatttttaaccacggaaaggtgggtataagtctccccggacattgttttagtttgaacgagataatatgtttcattaacaaccgttaacttaacatgatacaacggttcttcaaccttataaccaagaatacaagccctctcaaaatcatagcgacaatacgctatttcaaaatatctactcaatttgtctaattccaaagtatccggtaaatttactgtatcaggtgtgttattccgaaattcttggattgcatcactaggtgcccaattacgtttcgttacccaatcaacaaactccgccacaaaatttggtataactggtttatctacttcccctatctttctcattattgtaattccggcatttataccctcgttataacaaaagtctcttatatcagttcctgacatcctatggctttctaattccttaatcgcttcttgtttattcatagctactccttctctaaattctctctcttggctaacaaccggaaattttcataaaaataacctaaagtttcgtcaccgatagccccatcatctgcatcagtgtaaaattcatctttaactccgttaactaaaagtaccccgtcatcatctattccttcaacaaaatatacctttgcttcatgtgtacctttacgaataactaaatccccaacattcacttcccatttaggtattggctctacttcatctggcaatttaattattgtaaaatgcgttttatactctgggaagtcatcgtctaatggagtaccagaatatggtgcttcactaataggaaaatcccaccaaagaacatctcccatgtcttcatgccatttatctgctcgatatgctataaccctctgagagttgtcctgataatctttcacaggttcgattgataaccaagctcccataaactcttctgtattattagcaatccactttagtgctactgtttcttgtagacttccggtaaaaggttgggacttagttttataactaactagaatttccattatagtatcaaagtctgtatctgggctttctttccaataagtgagcaagtcttgcacttcttctggcaaggagtaacttattatagcctgctgtttttttaacgaacgaatagcattttgtaagtaagcttcttcgacatcccgacttttattaccatttaaaacccgctcaatctcatcaattgcatgttcaatgtgattcattattattcctcctttaaatccccaaattttctgtctaattcaacaccaaattcaaattcatcagctttcttcgataatttgcacatatcttcataatttttcttgaagttcttatgaataatcggagaacaataacctgtctctatccgtgctaatgaatacttgaccagtctagcaattttatactctaatgtttgataattaacaacaatatttaatttatttttttgggttgtaccactcatgtgtatatggaggcattgtaaccctattctcaaaccctaaacctgtcaacagctttttgactgcttctgtattaacttctaatgtgtccatgtctacctccaccagttaggttctttaataatttgccacgctctttttagttgttcttcgttgaaatgtccaaaatgacaatcctctttaggaataccaagcttacaagctaacacactgtacagctctcccctacttatctgtctagacttccatacagggtcaaataaactgtgacatagttttttccatcgtttcataggtggtgtagctaaaatacctagtggttcttttggtctgttcttgtgagtccctacactagcaccacaacctgtacaataataacatttaccattaccgtaaactttcccatataatacttcattacttgtccaaataactttagctccacagtaagggcagttatctggtactaacattttatccatgatttgttcacctctcatgtatacagtatacctctatggtatcagtaagtcaacactttttttacaaaaaaagaacagcatttctgctgtcctaaaaatcacaccaatcatctttatcgtaagaatcatctgtgtagtgttctttacctttaatgttattaacattaacatgctcgtcttcctctggttgctcttctttgtttttcttaacgaagtagtaaccaatagagaaagctatacccccaagcaacagtataataagagcgataaagaatttagcaatgaagaatcccattacttgtcagtgtccacgattgcttgtccgtcaccgattgtagtagtaacccaaccgtgttccttacgagcttgtgcttcttcgtaacgaactagttcatccgtaacagattctgcaattttcttgttagcttctgcttgtgcattagctttgtctctaatagcttgggcttctgcttgggctttcaaagtaacttttgtagcctcagtttctgcttgtgttttttgagttttagcatctaactcagcttttttagcttcttgtcctgaacggataattgcatcaattgatttttgtgtttctgggtcaacgtcaggtacacctaccgttacgttttcaactaagaaacctttaccttcaactgaatcagagaaacgagctagcacttctccctcaacctcagaagacttacctgaaagaacatctagcaaactgtacttagaataaacttcacgagcagtcttttgtagacgagatttcaaccaacctttttcaatgtcctcagatgttacgttaccgaactctttgtacattttagttgcttgtttagggtctactttgtagtcatacttaatgttaactacagttttcttaccgtcagatgtagaaaccgcaacatctttagcttggatagtttgtaaacggattgggtattgtgttactttatcaatacctacccatttaacaccgggctgtaatgcttcggatttaacaccaccgttaggtgagaaacgtacacctacataaccgttgtcgattcgttcgaagaaacggaaagcaccgattgtacctccaatcaataaaataactgcaaccactccggctacgactaggcgtttaaacgtcttctcggtcataaaaataattcctccaatatttagttttttatgtgtaagtttttccccttacaaatagtagtataccttacactgtataacaagtcaacaactttttttattttcttgtggaaaataatttaatgggtgtatggtcttccccttcaagatacttaccatcttcccacaagaccactgagcctttctctaggcttctctgcacatcaatgatacgttgattccatgaaccacggaaaacaaggttagggttgaatttatcctgctcaaaacgaccatctactagtacatctacgtaagataataattcaagcttatcttcccagttttcagcgttagaatccgtaagctcttcaaaggtataacctgaccatgaccagattgttttacctgttagctccgatttaatacgtttagctaaaggcagtagaacttgtgtatttaagaaaggttctccacctagcaaagtaataccatcacaataatcttgtgaaatatctttaaggatttggtcttctacttcttgggtatagtcttttccccaactaaagttttgtgcctttttattataacaccctaaacaattaaaagggcaaccggagacgtagatacttccacgtaccccgataccgtctaccattacaggaaacttgtaatcagcatatttacccttagacaatctttctgctgtccatgtcattgggtctttactcatctgtatttccttctttcttaacatgtaagccttcgtcataccctgattgggtaaacttggcttggcaaattgcacacttataggctttgtaccctagattattatacggaaccacttggtcttccccatcttcatcttggtgggtacacgctttttgtagcgcatttagtatttcgtttcgttgcttgattaatcgttctttctttgcaagatgtctacgctcttcatgtagaattgcagactctgcaatagctaaaagattttgtaaagaggaagctgtactcattaaattgccacctcgtaattaaatcttccgttatgtttgtagccttcaaccttaagttcagatagtgggcactcaaagaagttagtcatgttagcctcttcccaaggcaatactagcttaggttctgcgtttagaacttcctctgtcataggagcagttacttgttcgacagcttgtaccatatgacggtcgtagatatgtgcattgtcgatattccagaacattgtacccaactctaagccagataccttagacataactacatgtaacgcatgatactgcaatacgttaaatggcagtcctaagcacacatctgcactacgctgtttaacgtgtaagttcaacttaccaccctgtactgtccagtgagtagcccatacacaaggttctaatgccatttcatctaagtcttccacatcccatagagttgtcataattctacgagaacttcgattgtattttagttgatatagaatagtttctacctgattaaacttaacatagcacttatagtcttttgtttcagggttaacatcaaccataatatcctcttcgggaaaaaagtcttccggagaagctacataaaattcattattcgtgtctagttgcactttacgtttttattgcgtaactgccaaccataagcttttccgattgtaccatcttcttgttcccattcatcccaaatagtcactccacgttcttgtaaccacttgacattgttagacattgcttgccaaatccactctaattctgtaaatgcccacttagagcctacaaacttactcttaagaattggcagtcccatgtctggtgtaatttcaaagcttacaccttcaattgcatatgcaggagcaggttccccatcttcatagtgtgctcgtacttcatcgggattttgcaaaatacccttttctttgatggctaacacaaggtcagcataaattttgtcaaaactcatgtgtgttctccttttctatgttcgtctaactatattgatagagtctgtatacccatttcttcgtacccactctgtataactgttgtgctcttcttgcgcaatcgcttttaaagaaccataccacttcttgacttcttcccgttttttacgtttgaatactaatgatttgtttttatctatgacgttgataatcttacttactccaccagtattatctataagcattaatcgtgaaacggtcggttttgagggaaacatcttttgcattccctacatagttcttctatttgcccacctaatgcacgcaaatcagatactctacgcccgcaacgtatacactcagttccataagcctgctcaaaatattgtgcattaatacgaggaaacttttgcgtaagtcttagattagttgaaggtgttttaactctttttcttagtactgttttgtttttcttaaccttaacactaactgggtcattaccatcaaaatcaaaagaaaagctaattgttccagaagggctaattgttggggtaactacattgcgttccactcggtctgctaatacccgaacatctgttatacgaggacgtgttttctttgtgaataatcgtcctcgtgtgtagtctataccttgcatattacaaacctagccatgaacgtactttgctgaaagggggtttcttttcaggttccttgtactcagagtttgtacgttttaatttatcattgtagttatctgcaagtgttaacaattcatcaggatttactgtttcacaataaaaagcaatctcttccccagttagctctctattttcttcaatcaatttatcaagagtcaaatcgcaatactcatcttcccagtcagctaagaagtacatacgttccatgacataatctgatgtttcatctaagaatataccgaatagaattgggtctttatctcgattatcttttgctacttgttgacctacctcatctgtatagtctgtaaacatgataactaagcggtcaaatttatcttgtacacgttcaattacaggaacaacttcatctggaatttcacgggggaaatctttgaggtcagctagtttaactgaacgattttccacattttcaataaagttttcaatatcttctgaatacacaaaagttgtaatgcccatatctcgaatttctttttctaattggattgttctaatatgatggcgtaataaggaaatctgtctatcttgctttgttttaattgccttttctaacatacgtaatgcgtttgcgtaataacggtctaagtcggcatcttgattttcctttttattttgttttactcgttcgaaaaactctgtaggtgatagttcttctaatggtttcgttgttaagttttcagtcatgatacatcctcctaaaaaaatattccttacaggaaataatatatcacctgtaaggaataaagtcaacactatattaaaaaattgttgtaagcatttgactgtggtctaacgctagaacagcatccccagtaacacgcccatcacggtatagaataattgtagtatcatcggttgagatgtctactttagcctcgtgagaggtgatggtaaaccatacgtaatcactgtcagattcgtcttccttacgttcagcatctgaccgcatttgagctatatacatttgtgcaagattatgtccagaagggtctctattagggtctccaaacactgtagatggactaataccttcttcttgtccgtctaatgaaactgtttctaaaatactctcagcaagcatattaggggtatctgtggctcctaaaaaagcgttaggtaattcgtacacaccttcttgaactcggtgtagtaagatagtagcacctacttctaattgatttcttaatacaactaaagaaacgttaaatcctactttttcaatcatgttctttcctccatttttccatttcatttattttatcaggcaatgttcttcttgttaaacagcctgtagtacttacatgaagcctttgaactccattatttttgcctagaacttcgtctgctttcttatagagcatgtctgtatgttttggacaagctatctcattaaaagatgctccgttatctgctacacttacaatcccgtttgcacagaatcgactacgacaacctatacattcattcgctagcttcttcatgagcaacctcccactctgtggcttcccttaactgtagctgtctagcttcttctaaaggactgatataatcaggtagctcatctaccggtgtaaaacgttttgtcccgtcttcaagtataccataaaaatggtctgccggacgtgcaaaaactgtgttagcatttggtgaataagggttaggatacattcttcgatacaatactaactgctccccagtctctgtatgaagtacatcatcatattctagtgtagcataataagcacccttataatgacgaaaccacgttccggctctatgcttatattccattcctcttccccctaaagaaaagctagcactaggctagctctttatttttacctttggttaatttaccactttcatcataccacgcataaatggcagttacaacatttgtttgatataaaacatctctaattgcaaaccagtagttaccagaaccgaaatctagtaagaaccagaagaagttacttgcaaaccatccccaccatgaaaagtcaattcgcataatcattaagaattgagatacgattcctagcaagtaagcaataatgttaccccaatacatgatgttacccattagggaaccatctgtagtaaagccaattttatctccgtacataattaatacaattaaacctacaattgtgaatgctaaagtaaatactacccaaaaggcattcatcttacctactttaatacgcccatcttcatcttgattggattcttttgtccactcttttaacccgataatgtgtgtaataccataataaatacctgcaaaagccaaaccgaagttcccaaacatagtattaataatgatttcaccaacgttagaactaatacctaagatatttcccattttaggataacggtctgctaaagataccacacaaggtacacctaagcagtacgctgtgatataaaataaccagttagttttatctgaccagtcggtgacaaacacccccacaaccagtcccagtactaccaaagtgattgcgtactgtttgcgccatttcccattagctagtgaaatattgtccataaatgttttcatattatttctcctccttgttagtccaaatttcgtcaacgtataattgcaatgtatcaactgtagttccttctaggtacttttcgataattttcttgcaaagttcataacgagtttcataatcactcgcagttacttccacatatgggatatgattctccgcatataatttcttcaacaggttttggaagtcttgtctacgtttttcatcaccgattaaacgcataccatcatctacccatttagtcgaattatctaacaaaataaccaagtcaaagcggtcattgtcaatcttatcttgtacagatggatggggttttccttcatacgtaatacaaaaggcttgtgtagctacgtagtctgtatctgaaatagtaaatctattagcgttacgtcttgcaaatctaacatcttgataatgaccattagcaattgcttggtagtcactgtactgtaatgcactctcatctccgcctaattcaagttcacagtagttacgaccgtattcccaaacagtcgtagtagcaaagtagttacctagcttatctaccatcaaagttttaccactagactctcctcctgcaattacaattgtaggagccaatgcttcccggctagcacgaggtagatagtcccagtacttaatagggttgttacgtacttttgttgcactaatgttaacattagaacgctctgggtctactaacgtagtaggacagccaaagtatttttggtacccttccgcatcctgtggttcacttgaaaagaatgttgcttcttcccaatcaaaacctctttcagccaacacacgattacctgttacagtctctttcacaaggtttgcccatgcttcccacccattagggtattctggaatgtttgattcatctactaatacgggaataatgacatctcgttgaacttggaaagtcttttgaacaattcgtagcttgtcccgtgctgttagtggacgtttcatgttagaatccatgtataaacggtcatctcgactatctgaatggcttaccactacaacaagagtctctacttgtgtgcttgctttttgaatcatatctacatgtcctttgtgtaagggatagaatttcccaactactactccgaactttttcataccttattcctccttttaggtattttttactataattaattataccacactttactagttattttcaatataaaaatagccataaattaaaccaattgttaatgcaatccacccgataacaattaatatcgtagaaaggattcctttagacaatttggactcaacaaatttatcatatgcagtataggaaacgttaatagcgctgtctttacctctaactgactgtaacccattttcactagcatccgcaaggaaagttaaatgtaacttcttaggtacgccatagtaagtaatacgtacatctgatgataagtacttagtagttatatacttgccatcgaaccccgtaaacttgttaaagtcgtatatatggtcgtgtactttaactttatcaacctgtttagtcttagagccatagtatacccattcccagtaagtttctgttttagtttgtgtattacctttctcgtctacataactaactgttctagtccgcatctcgtagtgttcctcttctgcaacaactttcatgtattccccaccaatacgaggaaacgttactggttttattgctatgaaatcactatgcgtataaaagataccttgttgtgtatctaacacgtaatcatacgtttctttatcatctgccggaatagcagtttcgtacatttgattagattttatccggttctcttctacttttccgtgtacccatattcctagtaaactagttaaggtaacaattagcataggaataatgatgaaccggattctaccatccacccgcatcatttgctaaacaggtctgtatgacctttaggctccacagggattgttaacaattcataatcttgtacttcatacccttgcagtgcaagtaacttacgatttaagaaagttctagtgaatcgtttataatctgaaatttgtcggttataagctttacgatgactagcaactcgattctctgtaatactgaactccttcattgcttgcttataattgtcttgtgatttgagttctgggtatttttcgactactgcatttaaagtcgttttagctgagtctactttaccagtttctgcttgctgtcttgctttaacaataagttctaacgtactcttttcatagttattatagctctcaatagcatctactaagttttggaacaggtctactcgtctgttttcctcagtatttaaatccccataagcttgttcaatagatacttcgtaactgatagctctattttctacatgttttactccaaaaaatgcaacaatacctaataataaaacccctactagtgaaacaataattgtattcgctttattcatgtgctttccctcctaagaactgtttaagaatttctctccaattgacatattctgttgtatgtcctttgtcatcaatgtaaacatctgcaccaagcttacggctgttatttccatatgctttcatcaaatctggatgattctcattgatgtagtggtagttaataccacattctgccaaaaacctttttgcttgttctaactcttcgccttcacgacatgtccatataagaatttgttttcctgatttgtataggctgttaatcacttcttttgcgtgtggttgtagccccacaatattcggaaattcacttcttacaatagtgtcatcaaagtcgatagctatgtatttgcactttgataaatctttcatttgcttctcctttcaaataaaaaaggtatacccttctttgctacaagaagaagtataccttatgagtatcactaagtcaacactatcttacaaattatttgtaagaattttttatttctttaatttttcccatttgtacacccgtaaaactaatacctgtagacgtttctacgtaaggtaatgaggttacggacttactaactaaataatctctagcggatggttcattatcaatattatgctctgtaaactcgattccttcacctttaagcatatttttttacaaatgagcaaccaccgcacccattcttagaataaactgttactttaaccatgtgttatttcctcctgtttaaaccattttgaacctgtaaatgctacaacatcgttagctaaataaagcatgtaagttaacattaatacatacacagcgtgaccatgaagagctgtttgaatccatagtgctactgacattaaaccttggaatgtccagaagtaatactgtgcacggaaccctttaacacacaatactgctccaactaaaccaatcattgcacttgtagcatctaagaatgcttgtggggaatgcagaataactgtatccaacagatacaatgcaacccaaaatacaacaataagtaccaatgttttaagcatatgtgctcgattcatcttacgaggtttcaaaccttcattccaacgtttagagaagatgattggaatatccagtaaaataatatatgctgattgcataataatgtcactatagttgcctgttacacttgctactccaataagtagaattgcggaaataaacccaagtaaaccattaattgatttacccattgtaattgttacggtacaagtaaaaccaattattcctgcaatagtggcagttaaacctgttacagtaataccttgtccttgtaataagggtagaataagtcccgtaaacacttgaataaccattcccacaatccataaaattcttgcaggtttagaccatccagttagtccgtctctataatattcatatgtgaataattttttaatatgttccatcttgctgttctttttagcttccattaatttgttactcctccaatgtgtattaaatatctttacgctctatatcccagaaatgtgctacaacatgataaggtacatcaattccagatgactttgcatgattatagaacttcataactgcttgttgattgctttcttcttggtataattctttgtatgcgttaacggcttgtccctcagatatacagcctaattcaaataatttatctataatttgacttacgatttgctgtctatgttctgggttgttaacaaaatcaatctctgtaacatcgagaataatttttggaaaacctaaatctctttccatccaattttgatagttctcatgatgacgtttgaagtactcgtataattcggtaccttcttctactttttcaaattcacgagcacgagcattaattcgtctgatttcttcttcaaaagaacagtttaaaacaaccattaaatctggtgttttcttaggaagtggttctaactccttaagcattctctctagtaaacgatgatagacaccttgttccatttcgttcacatgtccttcttgtactaattggtctaagaagatactatcttcaaatatagaccggtctaaaataccattatccacactcattgcttcttgaatcatttcaaagcgtttggataacatatctatttgaaaaagtagtccatattttgatttgtcttggtagaacaattcaagcattggattctcttctacaggttcataaactgcttttgtatctaataggtttgctaatatttctgtcattgatgatttacctacaccaataactccggctaacgtaattatcataaccaactcctcgggatatttattttttttgacaatattaagagcctgactggcaggctctaataaaccttacatatgttttacacgtgcatctatttctttcttacgtccatgtgcattaggacgagcttgtggttgacctaaataaccacattgtcttttaacaacatcacatgttgcggggtcattattaccacattgcgggcattcataaccatctgacgtggggttgaactctccatcaaaaccacattcatgacatttatcaattggggtgtttgttccaagataaccaactttatcataactgtagtcccaaacagcttctaatgccttaaggttgtgaactagtttagggtactctacatagtgaataaaaccaccagaagcatattttggaaattctttttcaaagtcaatcttttcaaaaggtgttggagctttgcgaacatcatagtggaagctatttgtatagtattctttatctgtgatattctcaataactccgtatttttctgtatccatgcgacagaatctatcagttaaactttcacttggtgttgagtagatagagaaccagattcccgtctcttttgtccattcatcctttttatcataaagcttacgtagaacatctaaagcaaactcttttgcctcttcatgatgtgggtctgttttatcttgccagtcaccaccgtagaacatgctagcaacctcgtacagcccaatatagcccatagaaaccgttgcacggttatttatgaacaattgttttacatcgtcatcatcggttaaattagccccaaaagcaccatgtttgtacaagataggagcattctttggttgagcttcgtaagtacgttcaattcgataaaccaaagcatcatgtaataccttagctcgttcttcaaaaatttcccagaagacttctttatccccttctgattcaatagcaatacgtggtaaattaagagttactactcctaaattcatacgaccagagtttacttcgtttccatgttcatctttccatccttgtaagaatgaacgacaacccataggacatttaaacgaacctgttagctcaacaattttgtcatagttcaaaatatcagggtacatacgtttagctgaacattctaatgctaactgttttacttcatagttagggtcttctggtttacggttaactccgtctttaatagtgaacaataatttagggaagattgctgtacgtccttctgtacctagaccttggatacgtactttaaaaatagctttttggatttctctttcccaacgtccagtacctaaaccaaaaccaatagacgtgaaaggagtctgaccattcgatgtaaataacgtattaatttcatactctaggctttgcattgcatcgtaaatatctttgtttgttttctcgattgcatatgtttctggctcaggaatacggtaacgtttagcatctgtcatatgtttttgataattcatttcagcataaggtgctaatacttcatcaatgcggtcaaacgaacaaccaccatattgactggaagccacattcgcaataatttgtgctgtttgtgctgtagctgtttgaatggaatgaggtgaaccgatttctgcattacccattttaaacccgttcttcaacatatattcaaagtcaatcaaacaacaattagtcattggacggtaaggttggtagtctaaatcgtgataatgaatatctccacgtaaatgtgcgttagctacatgaggagggagcattttaagaccctcaactttattaactgtacctgctgtaaggtctcgttctgttgcaaaggtatttgagtccttatttgcgttctcattgacaatagttttgtccttttcttgtagcttacgtagccttacattaatgtctgtatcacctgcacgttcagcatcacgtaaagaacgaaactcaatatagtttctagctacgtttttagcaaaagacttcattaattcctgctctacaatactttgaagttttgcaatatcgacacgtcctgtatcgctgtaatgcttcactacaaagcgtttaacacgttcagctataatctctcctaaatctgttttagcgcccgtagcatccttctcagctcgtcctacggcacgtacaatccttccttcattaaacttgacagttcttccgtctcgtttaactacaaaaatctgttttgtcttaacatctacatcttgtgttgcttgcactcaaaattccgcctttcttacaatatctagtatacttagtatagcataacaatacttacagtacaagatgtaattgttaacaaaaaataaaagactacaaactaagttgtagtctttttcaacaaatattacaaattgattaatttttttctcagattagctcacctaagaaatcttcaccatcatctggtttcttgtgcttatactcatccgttttgagcattaggtacttgttacctgtttctacttgtaacctctcaaaagctctacggtactcctcagcactagatgtagcatctagtaggaacttagcattaaggatggctaaaaccgctagtagctcttctcgactaccagacatctgtaccttaactttaccatcctcagtcgtataagctccgattttattcttgattgccacagttacacctcttaatcttttaatttaattttaggcatagcttcaagaagtttattattgaactttccagaaataacagcttccccaagttcatttgttaccacggaaatccagtaaggagacttcggtttcaaacgattgttattaacatctaggaatgctctaaacaatcgagggaaagaggttactcctactaatttactagcaaggtcatgcgcaataactttcttagtgaaacgctctgcattgaatgagtctagcgtatacaacaagaaataaactccctgcaactgtgtgtttgacctaaaatctgttgaatcaataaacttttgatacgactgagcaaacttgacatattctttatagttacggaaacggaacgcaccatcacgtacaacatctgtttttcttcctgctgtactactataacctaacgcagtagaaatagtagaggacacccgtaatgccggatacgtagacatcaagttcaacagttgtttataactttggtatcctgattcggcatacttatggatgtaatcttcgaccttccatgatttacttgtactattcaattctgcaacatcaatgtcactgtcatcgaacgtataagtaatgggtaacccaagttcacgagctacagctaaacggtgttgtccgtcaataacttccatctttcgatttactttaatctcagtaagaaccccacgtttcgcaattgagtcccgtaaagccttagaaattttaactggtctgtttccttttagttgtttgaatttagacaggtctgctgtttcatagacctgttttactgctttatcttgcttcttttctttagacacctgtcatctctcccttaattattttttgtattgaatgctttgacttacctcagtgattttcttaacctttttaaatacattaggataacatttttccaaggtatttcggtctacaccaatgcgttcataggcgctaataagtttgaaagttccgtattgagattcaacttttgttttcttaagttgaatcatttgttcaagaatttcttttctaagttcatctctttgctcgtttaaagaatcaagcaactcctgaacacgtttgtattccttaaagttgcgctctaattctttttcttttacttctgtagttgttagtctcatgaccatctctccctttctttactatactcaaagtatatcattacatattataaaagtcaacacctatcttacaaaaaattgccaaaaaaatatttggcaatcagtttttgtcatcaggttctaatagcttgtccgcaggcatatcaaaaatccgagctagtttagcttgattgtttgctctggggttttttgattccatgctcccaataggatacggttgaccaatgtacacctagttttttagctacagaacgcaaggattcatgcttttcttcacgaacacgtttcagcaccaagggttttggcttgctttccacgattctcccctccattctatatatataactacagccctaggaaaacctagggcaagtagattatttaagtgcttcttttacaaagtcgtattctggtttatttaacacagacaacatcatttcttctggggaagtaatttctccgcctaacacttgtgttaagatgtttgtggagaacccagatactaaagctgtccctttttcgtcaaaacgtacaggtgtattatcatgacgagagtttacattccagaatactacagatggtaactcgtaacctgcctgttcgaacttaagttttgcttgttcatagttagtgtaacctgccacaccttggtcaaattccatatcggaaataataacgatttttgaaggtaactcatttttgtggtgtgtggtttttcaccgcagtagataaaatcaagtcgaatactttttgtaaatttgtatttctagcattgtatgaacatttatcgtaagctttcatcttatccataagtgtacctgacaatggtaagtttactaaacgaggttgttcagaaaatacgatgaaatgacctttgaatgcaccacttaagcgttcagcagtgtagatagctaaaccttctgcaacttcccaaggggtaacattttctgtaccaccccatgtcatagaaccagaagtatccgcaactacaattgcattatcttcaatatctttcaacacatcgtccatagatttccatgttgcttctagtgaacggtctaatgttctgtagtaacttctgctaccataagcccgaattacttcatgaggtaacatgttctttgcgttcattgttacttccccagattctactttagaaagtaaatcttcatattcgtctggcatgtgtaattgcaaagctttacggtatttgaacaatgctttagaggatacttggttcaaatcaatcttatggtattccttgcttgctaaccgaacttcaattacatttaagtaatcacgtaatttagcaatcattttacgataacgagttagacctgatttaccttcaaaacctaagtagttagcaatacgagcaccttgattacgtttcttgctatttggagaacttacattagctaaccatttacctagtaatgatacaggcttaccttctgacatgtttttaatatcagatgttagttggttaccgatgatacgtgcaccttctgtatccacaaagtgaatactacgtttgtgtgcgtactccatagtttcaaataagtctgtccaacgaccaacatatgccatgtactccattaaagtaacgattacttgcttgttttggttacgaccatccactaagtatttgattgcttctaggtaagcggaacgttcacccaatccacctaaacggatattacgtaagtgtaccaaattgcgtaatgctaactctgggttttcatcgtaagctttagcaaacatgtttcgtacatctcctaaacgaccacgcatagcccctgcttgtgcaaagaagtctaagttagcgtttaaagttgatgtataagttttagctccattttctgtagagccaacagttgtttcttcttttaggttgtctaaaaatgacatctgacatctctcctttgtatgatagtgttttatctaacaccactataacatgtaatattatgtaagtcaacactttttgtaaataaaaaactcatccgattaagaatgagtttgtatgtaatatcaagaaccacaggcttaattaaattcaatagttttaatttgttagttgattgctgtagggttctttatgctctggcaacctaagaggttagagctatggcaaaataccaaaacctttttaatatgtaacaagaatctattttatacgttgctctaccaactgagctacaggaggaatcatcctcccggcaggactcgaacctgcgacccacggctccataggcaataaaaattgctgttagattctttatgttccggcacccattaaggatggaactatagctatgctaaaaccgttttatttatgtaacaagaacgcattaactttaagctttaccaattaagctataccaccaatggtggcagttggattcgaaccaacaactcacatttttcagatgtattagtttttaaaagtttgctgtggcgttctttatgttccggctacctgttaggttggaactatgacatatgtcaaaacctttttatcttgtctttataatagcataagctatttaaactgtcaagtattaatttaaatatattgaaacttatttaaaagctccaatatatttaacggtacctttgcatttacgtgcaaaagcttctagctctttacgagcacctaaacggtctggttgagaagactgtactgtaacttcttttggtacagtaatttcacgagttttcttaactgtctttccgttttttaacttttgttcgtactcttctgtacgagtagaagttgttgaaataattccgtaaaatttagacatgttacgtgacctccggtcattttattttaatggggagtgatggagttgcaccacccgagctttcgcaactgatttacagtcagccccgctactacttacggtataactccccgcataagtatgtatatatcaatacaatgtacaagaacttttagtgaggtagctctcatagtgtattaatggggtacattgtgtaacttcaactagtattgcctcacacgtgactagtcttatatacacaatgcctacatacaacccgatagaccacccttggtacgcatattaagaggcgcagggtgatacgaatatatggattgcaggattcgaacccgcaccctttggttggaagccaaagatactacccttatactaaatccacatgatgttaataggcgggtacccgacagcgaagtatcattcctgtcttgtcattctcctattaactccataataccttgcctagagttgagctaggactcattttaaccaaggatatttgttatagaagtttgaatattaggtttttctgttgcctaccaaccatgctagtctattaacctagcttgagtattgggttttactgttgcccaccaactaaacttctaatcgggaaagcaggacttgaacctacgaccccacgctcccaaaacgtgtgcgctaccaactgcgctatttcccgttaacttatacatatattataacacaaacttacatgatgtcaacaactatttgtaagtttttttaatttatccattcgggacagtgtgctttaaccattcagccacccgcaggggtaacccgcaggacgggattcgaacccgtataccactgtcctattggataggcttgtgtacctgtcatcttccgattacacacacctagtctagttaccgtaccaatagatttgacaggaatctagggtaacgcccaatatggtgttaattcacctcgtattctgttacaggtttgcaaccctgaacaaggatgaccaatcctaatggagcatagcggactcgaaccgctgaccccctgcgtgcaaagcaggcgctctcccaactgagctaatgccccgtataaaacatctccgctgagattcgaactcagaatgcgggattagaaatcctgtggtttatccaattagcctacggagatatgattgtttacagataaggtactcctgtaaacaattcaattgcttcaatttcagtatgaaagttttcccattctaaacattcatagaaatcttttaagatatgcttgtctttcctgtaaacagtctcacctttatgggctttctcacagatttctctaacagcatccacattatacttaccaccagttttatactgctctaaaccagaatctaataaaactcgttgtacttcttcacttttatctcctgctttccaagaatcaaaagctttttcaaacaatgtgtcctccatgttttcaccttctacttccatgattgattgaataaatcttttccacttagaaggctccttgtgtttacctttacgaaaactcatgattagcctccattatctttaatgaaccgaggaggagggactcgaacccccaaacgcttttacacgtctacatgatttcaaatcacgctgaataccagttatgatactccccgaaaaagaaattgattgactagtactgttagttgactagccaaccggaactacttaaaccgaactctttaaacagctttagtagtttatatttcaaatggaaggcatgggattcgaacccacacatgctgttacacatctacttggtttccaaccaagcctctttaccgtttgagtaaccttccgtcttgggagcaggcgggtttgtgtcaagtacacaatacctaatcttttgtgcatgttgttccctaggcttcatgcacaccctactatctgcatactaacagacctgccaattttctaacactttttctaatacttcgtatggacacattactgtcttaccgtgaacatcatgtattctcaaaataatataatgctcatttatctcggaggtaacaaagtatatcttgtccttcactaaacctaaacttccgtttaaaccaatgaattttaaatacatcatgttacctcctaactatgtataacccatgaagcatcatggggggactgtagtatgcccaacctgcggggatgctccgctctgaatccgtagaaatcagccacaattatgtcactggtaaggatttgcaccttacatgcacgcttccattagttagtcggcaccttcgagatagggacatacagcttcaattttctaatggatttataggaatctagccttacagttgtttacccgacttgttctagactagcctgaatcttcccctgtgctatactgtgttaattagcgtttacctattccgccacagtgactatggagctgacgggactcgaacccgtgtcctaacgtagaaccatacaaaattctacgggcgtagttactagttttaatctacgttaaggttacaactaataactgaaattaccttaactgagtggtaaagcctctcctgagttatccacttttacctcagcgttgtcggttgatgagtcctctaggtagaaccgaccctagtctagaggggtaagtgtgtagctagtctaaaactaggctacagctagtaattcttcgtttttagcagttatatttactgcgatgattaagtcatcactctgcccgctattcatatactccttacgccagtcgaaaccaaaacagccccaacataagaatttcttttgactaaccctacccttccggcagggtctaatcaaaagtatacaattaaaaaaatgaaaatgagttacggaaaatgtaacgtctccaccaccggactataagggtaagttgttccggtctttaacctaagtactttacttaaatctaacaggacagtcttcattacgtaaactacttaaccatgtaaaacgtaaaggtcaatttccgttgacctaatgcaagaggagggattcgaaccctcactgaatagattctaagtctacttcctctgccagttgggatactctcgcataatactagcttttagtagtctaggcgctagttacctgtagactggtagtctcttgggttaaatagttctgttcatacgtctatgaacccgccaaacccggctacggaaatgcggttgtacttgtacaatacggagagtgagattcgaactcacactgaaccgggcttaaaccggatgcctctgccgttgggctacccccgcataagcactttttgcgaaacaaggaaaagtgtaaccttgggttattttgacatttgcagaactcgtaaccaacgagcgcacctaccctcagaaaggattttgtccctgccgacttcactgctttgtcaatgttagcctgcttgctaaaatagatgtcttaatgtgactgctcagaatcgaactgagattcatgtttccacagaacactgccttaccattaggctacagtcaccatcatgtgttccttacaagaattactatatagcatcttgtaaggaaagtcaacacttacatataaatttatttaaaaaagttttgatgaatctaattgagagaaactttcgggtagagaacctagctcttccatgtactcttggtcaatctcgtaaacagttaactccgttacttcattttcaatagtaagtttcattgcttctgctgtttgtatactatgtccttctacttgaagtttatcatcaagataaatgccttcccagtctcctgcaactacataatctgctttcaagatattacctactttcttctcaatttctgataaaaattattatccttgtaatcttcctcgtgggcataaaaattttttcatatcatatgtccaacaagtttcttctactcgtttatgatgtgtcaatgttacttcgtcatcaaaacgaccttgatttaatttatgcctgtaatttctgttaaccattctttttatgtctcgaacagttgagtccttcatacaaacataacggtaatagggttttctgtaacttctactcattgtaagtcctccttaatagatacttacaatttagacaatactttcttcacaggaaccactccttattaataaaagctacctcccgaaaaacgtttcttcaccaaagtgtaagacgtaaactaacgacaggtcatagttttccaatcaaggcaaataccagtgagaggatttgaacctctgacacccgccttatcaagacgatgctctaaccaactgagctacactggtgtgacccatgtgtcaggactttcacctgttctcaggggtgccccgcctctctactaatctcctcattcggtgcccctactagagtgactagagatagttagcaataaaaattatatatcatgaatcaaatttttactgcatcctatatacacgataccgtctacaggatttgaacctgtgacatccaccttgtaagggtggcgttctcccactgaactaagacggtgaaatatggaaccctaccagaggatttctttcggtattacaatcacctcggcatgaacaaagccagatattgaggtctgaacttctcacgccccgggagtcgaacccagtatagacaaaccatattttatacggaagacaggattcgaacctgcgatataggagttttagtgcactcattatctcccacggtatccgttgcgtattgccatcacgccactcccgtatgctaaccgacagtaaaggaatcgaacctctatcactagattcgtagtctagcatcctatccaattgaacgaactgtcgctctaggctagcaattacgcagactgactataggcaccttcgtcccatcacctgtaagtgccctcctacaggttgtccgtggcaccgcaatgtactaaccgatgtccccacagggatttgaaccccgaaccccccgattaaaagtcgggtgctctagccgattgagctatgaagacagttgtgtttttcaagataaccctctcgaaaaaccgttactaatagaaaaactaagggtctcgactgacagatttgaactgcctgctcctcctaagaggcgtgttaccaaagccatacaccaactcttcgagaatatcccctacaggattcgaacctgtgaccccctgattaagagtcaggtgctaccaccaactgagctaaggagataagattaccaatagctagttaagccttacggaatcgaaccgccatgaggttatgaagctcacatagaccactagacacaaaactagcttattgataaaattctatatagataattgtatgcaatgttcgcactaactaaccagataaccagtcaatcattcaaaacattaatttgtgagtttccgctcacaatgctgattgagagaatcgaactcccattcccgggttacaaagccggagtaatagccgttatactaaatcagcgtaacccctcaatagaggggaattattatactaagttaccatacccgtaggtatttgtttgagcttgtttaaacataatgctcttgatagttaagtcgttgtacttttcatcgtcttcatcatcaaggtacacatcaacgttaacgttcttaccggaaataccgattgtttcgtctttaccaactgttaagtctttactgttgaaggatacatcaaagtagatgctatcttcttttgtacgactaccgaacgaaactctgtcaccaaataaatccaagcttcgagagttgattacaacaggttgtaacccaccttcaaattgaatagttactgtataatattgattttcaatattaaggatatttaaatcagcaatagcttcaccaaatgggataccaaagcttaattccaatgcaattgctcgtaagcagtcatagtttaacttaattctacggctaaacttaacaacactgtcaatttcaccatagtaagcttcgtctaacttatcttgcaagtaagtacgaatttcatctgcatcaggatattcgaaacgtaaatggtaatggaaacgtcccggacgattaagcataaagtcatttacacgacttaagctattaacagtaagagcgtagatacgtttacgttgtgataaaccatcgaataagctcaatagtttttcttgtggttcacgaccgtcacggtcattgaatactttttcaaattcatcgaacaggataagagactcttggtcaatactgtcaataaattctgcaatccccggataagcttctgtaattaagataacaggcatatcctcttcaatagctcgttgagataagatttgagtaaatagtgatttaccaatccctttgtctccacttaaaatgattcctaagctacgattaattgttttaaatgtgtgtagcactttttcaattttagctaaacggtcaccgtaaactttaggttctttcaattcaaaatcgtctgttactactagtgagaacccagacattggattgaatcgaactttataagtttgcgcaggcaacttatcataagttttaaggtcgtttgcataaatttcatagttactaccatagttgattactttcataaatattccccttattcgtgttttattagcatttgctaatggagaggggtggaattgaaccaccgacccctagggtttcaatctagtgctctaacctactgagctacctctccgtgtcaatttggacttatcccccacgtggttactaagataagtcctatgcctttgaagtgtggatactcaaaaatgagtacaggtactaaaaatctgatgacaagtcagatttatgtcataagcagaaggtgagattcgaactcacgctcaggggtttgcaatccctagccttaacccacttggctactcccgcattggcatccctctaggtttttatctgcatcgggactcacataaactgataagtgaaaacagggcactagtctgctttacacctgcgctatcagaacctagactcggcaacactgccttagatgactttactcttgtaaacacgtcacattcttcaacaattaccagtagagtgctacataccagtaattcgttcctgtgaaggatagtacactataactatcaccgctgtccaagaatacacgccgtgaaggattcgaacccccgtcttccgggttggagccggaaatgatagccactacaccaacagcgcaagattcggaggggagggactagcaaccctccgaaaaatgtaagataatgagagattaaaacatgccactattaaaagtggaataggtaattaaggattcgaaccttacaagcccttactgcttaccttgtaaacttatagtatcatgtgttgtaccgaaagtcaacactttttataaaaataatagggagaaatatttctccctaaaaatggactataccggaattgaaccgatgacctgtcagttatgagctgacggctctgacctactgagctaatagtccgtgtaataataccacgaaataaaccttagtaagtcatatagtcccagaaagggaggcatatgaaactagtgttgaatgccataatcgtttaataaatgtgactgagagagtaataaatttcttaggcatgtccatatgcctcctttccaataatgataattttaagatataaacagaataaataaaagagaaaataataatgaataatagcgcatgagagagtcgaactctcgattccggttcgaaagaccggtgtcttgaccgcttgaccaatgcgccataaacgagctatatgggacttgaacccatgaccttctccgtgacagggagacgagcactcctgactgctccaatagcccaatgtttccccaaccaccgccacctaggggattcgtacgtctacgtgagttttctggttatacattattgttcaagacaatagttgtacgagtggaataccaatttaccactctgcggttcctattgcggtaggtgggagtcgaacccactaaagcttggttatgagccaagtgcctaaaccgttcggcatctccgcagtaatacaagtctggttaaaaactcaaaacttaatagattaagggcttttcttcctgcttcatatacactcactgcattcggtcacatactcagagaggctgaaccatcgggagctacccaatagcttctctctgcctttaatgtatggtctagcacggtgactaacaacgttcacctaaacattcagcattaaaagtattattttacatataacccatatgtcttctgtaatattttcatccaacgctgacttaagctacttgtaccaaggtctcttgttaaacctgtatttctacagttctcgtcaaagggagtcttttgagttttccaaggtctgccaagcttctcacacttccacctaacttggattcttttccacaggaacgtctattgtatcccccaagagtcttgtaccttacaatccatgtatactccacataacgcttaactgatattagcttttactaatagttactcctatgttaccataagacctacctgcaacccaaagcactatcgcaccttcggttacatccagactcacgccacgttatcctagcaagctgttcaaactttctgcactaggttcaaaatctattaagttttcaatttttaaccactaacttgtggtgtaatactaatatagcataacattacaaagttgtaaacacctttttgtaagtttttttgatttttttgatggaaggtaagggggtcgaacccttacaccggatttctccgacctaactgattagcaatcagccctcttaaccatttgagtaaccttccaaaagcaaaagggaacccctgtaattaaacaggggtaagagagatgtctctaaaagcctacaaccattataacatagaaacatagtttgtacagccgtaactgtacaactgtcaggacagggttcgaacctgtatcgcaaccttcaaagggtcgtgtcctacctgttagacgacctgacaaaaggtggaacctccctaaatttggggaagagggaggttctcatgctattaacaaacacgaatttgctaaccaagtaatcttgactagcaactcacctagcaggacttgaacctacaagaactggttaacagccagtcatgataccgtttcatcataggtgaattttagttctatcaacattataacacaaaagctgatagaactagcaacttttttacaaacttaacaacttttttcttaactactgattcagcaacttactcaatagttaaagacttaaagaaagaggaagtaattgaggtatgtcaatcactaactaaagtatacaacatttttatcatcctgacaacaactaaatgcaaaaaagttcaaaaaagattataaatagttaaattatcagaatattcaaattaatgtcctattttaaatttttgacctccttatatacttaatactatatattaaatctatatatctaaattatataaatattagaccatatattattaatatatataagacttgcaaaaaattaaaataggacatttttctgacaattcacttttagataaaaagaaagagagcaaaatgccctcttaccgtgtttcaaagtattccttgattgtatactctctagcttctttagcttcctcagtttcatctttaggagctaaatacaatttagtaattgtagcgggtacctctaccatcttatagtcaataaaagtagcttgacgtagatttaagtatcggatacctgttgttctatcagtacctgtatgaacaggcaagaaagttaattctttacctctgacagagccattagcttgcgttagtgcatcaactacagttccgcccatatagcgtggaaataggtaaaccttgtcagtacctactgtaatttctgcgaccttttcgtgtgttggatagttcacttataatttctcctttcagaatatgctataattacagtataagtataacacattctatggtttaaaaatgctgaacacgtaagtcacaaccgcaccgagaacaatcatgaagatgttttccacgatgtctcttttatggtcaaactctttgtcgtttacaccttcgagagcatcaatggtttcttccagttttgtaatctggtacgtaagatgtgaatatttctcttcatgaacagctaaccttttatcaagactgttaacgatgtccttcaattcactaactgcattattcagttctgtgttgtcctgtttaatgcccttctcagttagttctccatgttggagcttgtcttccaatcgttgcagtcttaatactaggtcacctacttggtaatcgttcatttgtgctccccctctcggttgtatagctcaatctcccggtcagttagaaaaccacatgtaaccgcctatgcccagaatacatccgacaaggtaaataattggagtatacagcccaatgaagagcataaccacgctaccaacactaagtccgtataatatcaaaagatacttatacgatgccaaaggacttaaatctgcttgcagttttttgtactgtatagctcgggtgacatagtaggatgctgagtaaacgaacaactgtagtaataacatagcaataaatgctagtcggtacattctatcgcctctcttctttcctagagctacctttaatatagtacaccaaagcctttataatcaggtgtgctagattaaatatgtaggctaaaaaatataaacggaagagtgagaaaaagtgaaggtacggaaaaaattattatacaaatcaatttttatcaccatctctgttatcatcatgatttgtgcaagcaagctgattgcagatatgctaggcttagaacaacactttacaacaacaatgcttgtaggaggttctttgtgggcttggatagctagtattgtctttgattcttatgagaagagggaaaaagaaagataacctacagcaacagcttcatgaagcactgcgtgatttaaaagagataaaagcgttaatcaaaaaataattaataaggggtggaggatatgtcccttacaagagaagaaataaaacaaaaaaggcagtatatttttagcaaagctcaaaagacgacaaatatacgaaaaggggataaacgcatagcaagtgctacacggatgtgtgcagtatgtggaagaccgttgtccagacttgttcttactaatggttctgcaatagttactacagcacatgtaagctgtaagatgtcagatttagtacgattgaacatgtgcgaagacatacggtcttgctatgcgtatacaagtaaaaagggggaggaatagccacatgagtatggcagaccgtattaaagaaaatgctgaacaaaagaaaatggaacgtacatccgaacaacgattacgtgacacatttaataatgcttctctcacgttaattaaccagttcatggctaaagttatggcaggttcaatagatatagatgacgttggggatttaacccgtctattccaaatctacatgcaaattaataatatcaatgcaggaatgcaagagggaactggtcaattacctgctcttagcgctacgcaaaaagatattattgcagacaaggtaagcactgaaaaggctaccatagacggagaggaggaggaagttgtttcgttggaagagttagctaaattatcagacgaagaaattgataagatgctattggataaggaaatccaaatgaacaaagaaaacgaagcaacgttttaatgacaaataaagcacaacatattgctaaaatggcaaaagaaatgtatgggacggacaaaataacaactgcacagcttgcctacatcacagacatgttaactccgtccacatatttactaagaaaccactccgttcgtaatcatccgattacatttatgatttccggacgtgaccaacaaaaagcccaagcgcatagaccttggcaagtaaaaattattaatgaccaacatcgaacaaaggcagttattaaatcacggcaattggggctttcagaaatgggtgtaggaaccatgctacactttgcagatacacatagttacgatgcagttaagtgtttgtataccttcccaacaaacgaacaaatgactaaattcgtacaaacacgtcttgaccccgtattgcaacgtggttactacagtacgattattgacccagaagtagactcattaaaggctaagaagattcgtaatagctttttatacttccgttcaagttctaaaccgggagctgtagaaggggtcgatattgattacctatctatggatgagtacgaccgtgttcctgcattagccgaagcttctgcattggaatctatgtcatcttctccatataagattgttactcgttggtctactccatcagctcctgatgtaggtatccatgctttgtttgaacagtctgaccaatactggtacctacacaaatgtgataagtgtaatcattataaccaaatgaactatgaagactatgtaccagaggcaccagtggaacgtagagggaacatcctttgtgtaaaccccaaaggggtagacccaattgccaaaacagttgtggatggctccttccaattcgtttgtcaaaaatgtggagagccattagaccgttggtacaatggtatatgggttcctaaatatccagaccgtactaaaaatggtctaggtattcgaggatacatgatttctcaaatgaatgctgtttgggtatctgctgaccaattaaaaacaaaagagctaacatcactatcgaaacaagcgttctataactatacgttgggttacccttatgctgaccaaaaacttactgttaatgccggtgacgtagaacgtaacagacgtggagaccttccagagtcccctagagaccgtggagattacaagtttatctctgtaggcattgactggggaaacagacattgggtgtccattcatggcgttagaacgaatggtcaagtggatttaattaaattgttctctgtaggtaaagctaacccattaaaccctgatgcgattgatacagatattcagtcaattcgattacaattagcaccatatgaacctgatattatcgttgccgatgttggtgactctggtgataaagttgctaaactgattcagatttatggcaaagaccgtgtatttggttgtgtatatccatctacacctaaatctacaggtaacttagtaccaagttggaatgttcaaggtaacaaggtatctgctgataagctaatgcagaataaacgatacatttcaaacatgaaagatggagttattggtttctatcacaaaatggatagtgaactaatgctttacattgaacactggggaaatgtagtaattcgtgatgaagaggatgaaaaatctcctacaggattccgacaaaccatcggacgtaaaggtgatgaccactattcacaagctagtgtttattccatgttaggttatgaacacttgatgaacgtatttacaggggcagatgactacgggtttaactctgattggatttctacccaattgaaccctacacctcctgatatttttactcagtttacttaaaaaagcaaaatgtcctattttaatttttctacgtccttatatattaatactatatatctatatacctatatctagttagtaagtatatatagtataatatattatataagggagacaaaaatttaaaataggacatttttattaaattagctattgattgacaaaaaataatatgctattatactacttgtcaataatagcactagttatttttcttgtcataacaataaaggagacgtttacatgaatgacaatcaagaataccaagctcttgttgataatcttcttagctctgttccagaatttaaacctgtagaagccacagtcagtaaatcctttttagaaggtatgctaggcaagaagttagactacgggtatgttatatcagaaaatgaaaaattatcaaaagactattcacatattgtgaaggcttatggttttaactccttttatgacctatactgctatgctgatagttgtgattcactaaatgactatttaattaaaggcggtcaaaaagatttatcaaagttgaagccagttaaaagacgagtaatgagaaacggtaaaatgatgacgactactatctacgaagacagttccggagaagatgatgataaaaacccattagataaggacacccaaacagaggaaaacgttgagccaagaaatgctagagatttaagcaaaacaattattggagatgaccataatggtatagacccaaaacaaattgctaaacttaaaactgaggcaggtaatttaaatgggacattttcaactgattgttcttcatacttagttctccaaggagaaaccggagaacttggtggtgtggcaggttatcgtaaagagggtagctatttatatttagctttctaccaatcagacgaccttacaagtggagtggcttatgtagcatttacacaactattgttacgtgctcgtaaacttggcttaggtgctaagattgatgctactgacgacccgttagcactagaattatttaaagaatacggacttaaaaaaagtggtagttgttatataatttccaagagttccctactggaagcgcttggggagccatgatttcaacttttgagttatttttaattttagccttctcaacaaccgtgtttatatgctataatctttttgtagctcaaacagtcaagacaatttttgatttgagaaaaaaggcacaagttgtgctaactgaaagagcaactgagctaacgaagaagttaacaaacatactgaaaggggatgtacaggagttgccagagaaagaaaacgtaattattaacgaacaaacactctctgacttgttagtcgaaaaagcaagcgatgccgactacaaattgttcattgagaaactgacagagattgtaaaggatttatattcaaattatcaatttcttcgtcaagacccacaacccgatgatttcatgtcaggttattttttagggttccaagtttttagagaggaataccctgtcgaatatgagtatttattccgattagctattgaccgtgggttagacgatattaaaatcaataaactctttgtcgaagctttacaaaacggagaggtattaccattaggggatgccattgtagaccctaacttgtccggatgcagttctattcttcaagcacaagaagtacgtgtaaacattgtattcgcacctaaagcatacatggagcgtaaagaagagctgattgaagaaaaaactgctgaaatggaaaagcagaagaaagagcaacaagaactagcaatccaaaaagacaacgtggttaaatctgcacgtcttgctgaggctgtcattaacgaattagtggatgaagtcgcagaaaaacacgaactacaagaactcgttaaacaaattaaagaaagcatgaggtatttctaaatggcaaaccctacaaccaaagtaacattaaaccaagcattaatcaaagaattgcgtacacttcaaggaaaaagagagtccttgattgcaagcaatctacatgtaccagaacctcagtcagttatgattccaattcctaatgttttagtaacagatggtgacaaagaggtattaaaatttattaaaaatatcggtttaattagagctgataaatcttttgggttagatgtggcaattgaagcaggagaaaaagtaacccttacagatggacgttcttccactatcttggaatgtattttctattacacaggagatacaaaaattgatgaaattgagcaattcttagaacaaaactaatatttcctgattaaaaagaagctttttttacttgtgctatattaacactgcacaggaaaagagagcttcttttttgtgactttttacaggaggttgcaagatggcaggagaagtatttagtagtttgattacaagtgttaaccctaatttgatgaacgcaggtagtcgtaacggtattgctattgaccgaattattctacatcacaacgcaacaacaaataaagatgttgctatgaacacatggttattaggtggtagcgcaggtacatctgctcactatgaatgtacaccaacagagattattggatgtgtcggtgaacagtactcagcattccatgccggaggaactggtggcgcagatattcctaagatttctaaccctaaccaacgttcaatcggtattgaaaatgtaaattcaagcggtgctcctaactggtcaatagaccctcgtacagttacaaattgtgctagattagtggcagacatttgtaaacgttatgggattccatgtgaccgacaacatgtcttaggacataacgaagtgactgcaacagcatgtcccggaggaatgaacgtagacgaagtagtacgtcaagcaaaacagtttatggcaggtggaaacagcagtacagctacagccactcgtcaagcattcttcgatgttgtgaacgtaaactctggtgcatttaatgtgcaaggatggttcatcccctagcaagtctacaaaaggacaatctatttggttgtactttatggacaagaaaacgaataaagaaattgctcgtttccaaggtaaacgtgtagttcgtgaagacgttaagaaagtatatccatctaaccctaacggagcagatgttggttttaacgttgatggtgcaactccacaaagtcttatgggcaaagactattacttcttgttacgttacaacaacgataacaaagaagaacttttcgtaacagataaagtctttaaagcacctgcactagttaaccgtggttgcctagacgtaattagaggtgacaaaggtcaggttactttacatggatggcatttatcctccaaacgtagaaactctgacaaacacttcttgttcatcatggataagaaaacgaataaagaaattgtgcgttttgacgttacaaaatcttcattcaaagcttccccagatattcaaaaattgtatgacggtacaattgcacaacgaactaattgtagatttgcttttgctcatgcactggatgctaaatcccctgcacgtggtaaagacatctatattttaagtcgttactgctctgaccctgcggggaacaacgggatttccgaccagttacaacttggtggaactcacaaattgtaacattacattgacctaccttctggtgggtcttttttattactgtaatataatgtaaaggaactgtaatactataggactaactttgtaacactaatttgctatattagttcctgtaagcaacacataaaactaaaacaacccaaaggagaacgacaacttgaagaaaacgacaattgcaacattaggacttttaggactaggactatcattaggattgggagctaaagctcacgcagacgaaatccaagaaaatggacaaacttactggcaagtagaatccggagatacattatcagctattggtaatcgttacggaattgattttaacttaattcaccaagcaaactcagacaaagtttcagatgctaacttgatttatgtcggggacaaactattattaccattaaacggtgaagttcaagctcctgtagctcaaccagtgcaagaagcaccagttgtagaacaagcacctgtagtagaagaaacacctgtagttgaacaggcaccagttgttcaagaaccagtagaacaagctcctgccgttacatctaactcagcaaaagaatggattgcacaaaaagaatctagcggttcttactcagcaactaacggacgttacattggacgttaccaattagatgcttcatacttaaacggtgactactcaccagaaaaccaagaacgtgtagcagatgcttatgttgcaggacgttatggttcatgggagaatgcacaagctttctggttagctaacggttggtactaaaataataaatactaacagattaaaaaaagactctcttttagggggtctttttcttatgctatattataactgtaacttaaaaacaaacaggaagtgatagctatgagtaacattaacatggaaaccgcaattgcgaacatgtacgctctaaaagcacgaggtattacttactcaatgaactactcccgaacaggtgcagatggcacaggggattgctctggtactgtctacgattctttacgtaaggcaggggctagtgatgcaggttgggtacttaacacagatagtatgcacagttggctagaaaaaaatggttttaaactgattgcacaaaatcaggaatggtcagctaaacgtggagacgttgttatctttggtaaaaaaggtgcaagcggtggttccgcaggtcacgtggttatcttcattagtagtacacagattattcactgtacatggaaatccgcaacggctaacggtgtttacgtagataacgaagcaactacttgtccatatagcatgggttggtatgtgtatcgtttaaatggtggaagtactcctccaaaaccaaacactaagaaagtaaaagtacttaaacacgctaccaactggtctccatcaagtaaaggtgcaaaaatggcaagttttgtcaaaggtggtacatttgaagttaaacaacaacgaccaatttcttattcttactccaatcaagaatacttgattgtaaataaaggaacagtacttggatgggttctttcccaagacattgaaggtggatatggttcagatagagttgggggaagcaaacctaaactacctgccggatttacgaaggaagaagctacgtttattaacggtaatgctcctattactactcgtaagaataaaccaagcttatcttctccaacagctacaccattgtatccgggacaatctgtaagataccttggttggaaatctgctgagggatacatctggatttatgcaacagatggacgttacatccctgtacgacctgtaggtaaggaagcatggggtacatttaagtaacatgacttaagagggctatttagccctcttttttgtgctatattaaattagtagacagtgatgaaaaattgttacagggctacctgtggtatacttaaactagtacaaatgcttgggaggtaagaatacgtggcatacttacaggacgatacatggcaagcagtaaaacagttagctaaacaaaacggttttgtaggagactggattctaattattcacctctactatgaaaacggtggaaacaatgtacaagttcatactgctatagataataaaaattaccgcatactacgaatcttagataacaaacaggttttattagttgatagagaaggaaacgttgctgtagaggactatgaagtagtcaatgatagtcagaaaggtttcttttatagtgatatgcacaaagtcgaactaacacttccggaaggttgtagcttcaacggtaaacaaagaataaaaatttatatatgaggtaggtgtaatcaagttgccaaaatggttagataaagtgttgggtgtagaagaagatactgacatcgttaaaagcgaagaagtctaccaaaccttgcttaaagaaattcaagcacagccgttaacagaaacggtagagaaaggtatgaatggtaaaccagtagcatacatgcaacctataattggtgacatgtcagtaaaccccggatttaagacaaaaccttctattagaaattctcaggatttacacaaaatgttgaagaagtttggtaataatatcattcttaattcaattattaatacacggtcaaatcaggtatctatgtattgtaaacctgcaagaaactctgagacaggtgtaggttacgaggttcggctgaaagatattgaacaagagccatccacacatgacattgcaaatattaaaagaattgaaagctttttagaaaataccgcagtattcaaagaccaaaatagggataattttactgctttttgtaagaagatggtacgtgcaacttatatgtatgaccaagttaactttgagaaggtattcgataaagatggtaattttatcaaatttgataccgtagaccccacaacaatcttcttagctactaacggtaaaggaaagattattgaaaaagggagaacgatttgtacaagtactagacaatcgaatcgtagctaagtttaacgaacgtgaaatggcttttgctgttcgtaacccacgtgctgatattgaagtaggtcagtacggttatccagaactagaaattgccttgaagcagtttattgcacatgaaaacaccgagacgtttaatgaccgattcttctctcacggaggaacaacacgtggtatcttacatgttaaagcaggacaacaacaaagtcagcaagcattagatattttccgtagagaatggagaagttccttatcaggtattaatggttcatggcaaattccagtagtatccgcagaagacgttaagttcgttaacatgactccatctgctaatgatatgcagtttgaaaaatggttgaactatttaatcaatgtaatttctgcgttgtatgggattgaccctgctgaaattaacttcccgaataatggaggagcaactggttctaaaggtggttctttaaacgaaggtaactcaaaagagaaaatgcaagcttcccaaaataaagggttacaaccattattacgctttattgaagatactgtaaataccttcattattgctgagtttggagacaagtatcaattccaatttagaggtggagacctaagtgctcaattagacaagattaagattcttgaagcagaagttaaagtgtttaaaacagttaatgaagcacgtgctgaaaaagggttggaaccaattaaaggtggagacgtaatcttagacggtgttctaattcaatccattggtcagttaatgcaacaagagcaatttaactatcaaaaacaacaggataagcttaacaggctcttagagctttctggtggcgaagcagatgattctaatggaattagcttccaagacaaacaacagggcttagatggcacctcagctagcgtaaatggcaaaggagagtcatctgttggtaaagatggacaaattaaaggtaagggcataactaacaccaattctgctaaacaaggtatgaaaggtgacaaacctaacgactggcaaaaataaatagaggggtaacactctctatttacaattgtccaactgtttagtggtagttctgctatattaaaaacagatgtaagtttaggtggtgaatgaacaaagatgcaagagaagtataatattttcgttcccattgacgtagcaggttccgtagagaaatctgaacaggcaaacgatggtgaatggtacgtacagggttatgctacaacgcctgaccttgacttgcaaggagacattattttaccacagggaattgacatttcttactttgttactaaagggtgggtaaactacgaacataaacaagatgcagaatacattattggtgtaccaactgacaactgttatgtagaccttaataaaggtttgttcgtggaagctaaacttatgaaagaaagcaagtatgctcaatcaatgtggcagttagctaataccattcaaaaatcaggaatctcacgtcagttaggtttctcaattgaaggggcagttacaagtcgaaatgcaagagacaatcgtattattgagggtgtggctatcagaaacgtagcattaactacacatcctgctaacccacaagctacgtgggaaacacttgttaagtcttggacaacagggtatggaattactcctgagacacagacagatgcaggagcattacgtagagagatgtttaaagaagacatcacaaatctaacatatgcagtgaagacagtagctaagttgtatggtaaaaaacccgaagataaagagtttatattacgtgaagttgctaagagttttgaccaagaaacctctgaaccagagttaagtgcatttatgttacaattaactagaggggtttccttacaggaagctaacaacttcattgaaagtagaaaggagctaaaatagtgtctaaaacaattaatgacattatcgaagatttcgattcaaaagtgaatgtacaggaagtatctaaatctattgaagatgaaaatgtagagcctgtacaggaagaacaaattgaaacaccagaagctgttgaagaaggtgtagaaaatgacaagccggaagaacagcctgttgaagctgaggaagttaaagaggatgttgaaccagaatccgaacctactgaatcagatgaaaaaccagaaacagaatccgaagtcgcagaagaagctactgaaccagaagtggaaaaagtagaaaaatctgataaagaatccgataaagaagatgaggaaaaaaaatcttctgatgacgaggacgacaaagaggataaaaaggataagaaagataaaaaagctgacaaagaagataaagatgaaaaagatgaagacaaagaagatgttaaaaaatctgatgagtccgaagacgtagaaaacgttgaaaaatctgttatttcttcccaagatattgtcggtggattcgaagctgtattcaaaaatatggcaaacctttttgaaactcaaaaatctttaactgatactattacagaattaaaatctgaaatcgtaagcttacgtgaatctcacacacaagctatcacaatgaatacagaagatgttaacaaatctattcttgtagataaagttgatggagtatcagtagaaggtaaagcagtaggatttgtttctaaatctgtagatgtagaagcagatgtgacttctgaacaagaagatgttgttgaagtagtagtagaaggtgccgaacaagaagaagctccggctaaatctgatgaagaacaattgtttgacagtgttcgtggaatccgtgatgacttaatgagcacatatactcgtgttgcaagtaccggacaagcccctcgtggtgagttagaagaaattcgtcaattatggggacgtattaaatcccaagacgaactagctcgtgcacaagcattcattgataaatacaaataaatttactaaaaggtaaattttttttaaggtgtactgctatattatagtcagaaccaatgagagacctgacatttccccctgaacctccacagggtcaggtctcatctttgagaggaataaaaatgaaaggtgatttatatataatgccagaaaacaaaaaacaagaagctaaattaaatcccgttcaggaacaagtaatcaaaggatttacaactggttatggtattactcctgacacgcaaactgatgcggcggctttaagacgagaatttctagatgaccaaattactatgcttacatgggcagaaggagatttgtcattctatcgtgacatcacaaaacgccctgctacatctacagtagctaaatatgacgtatacctagcacacggtaaagtaggacatacacgtttcgttcgtgaaatcggtgtagctccaatttctgacccaagcttacgtcaaaaaactgttaacatgaaatatgtttctgatactaagaacatgagtatcgcaactggtttagttaacaacattgaagacccaatgcaaatcttaacagacgatgctatctctgttgttgctaaaacaatcgaatgggcttctttctacggagatgctgacttatctgaaaacccagaacgtgactccggtctagaatttgacggtttagttaaattaattgacaaacataacgttattgatgctaaaggtgaaagcttaacagaagcattacttaaccaagcttccgtattaatcggtaaaggttatggtactccaactgatgcttacatgccaatcggtgtacaagctgacttcgtgaaccaacaacttgacaaacaagttcaagttatccgtgacaacggtcaaaatgtaacaatgggattcaacgttcaagggttcaactctgcacgtggtttcattaaattacatggttcaacagtaatggaattagaacaaatcttggatgaataccaaatggttagtcctaatgctccacaaaaagctactgttcaagcaactgtagaaactgacaagaaaggtacattccgtccagaagacattgctactcctgctgagtacaaagtagttgtagtatctgacgatgcagaatctgctccatctgacgtggctaccgctacaattgctaacgctactgacggtgttaaactagcaatcactatcaacagcatgtaccaagctcgtcctcaatacgtagctatctaccgtaaaggacatcaaacaggattgttctaccaaatcgcacgtgtacctgcaagtaaagcagaaaacaacgtaatcactttctacgatttgaaccaacaaatccctgaaactgctgacgtattcgtaggtgaattgactccatctgtagttcacttgttcgaattactaccaatgatgcgtttaccattagctcaaatgaacgcttctgtaacattcgcagttctatggtatggtgctttagctcttcgtgcacctaagaaatgggcacgaatcaagaacgttaaatacattccatctggaaacgtaattaacgaacgctaatcttagtttaactaagaaaaattgaatagaaaacggaatagggaacggtctaactgttccctatttttattataacgaattaaatggaggaatacaaatgttaaaatctacagtattacaaaataaaaaagtggcaacatcttttggagaagctgaatttaaccatttaggagaaagtcataacttgccagaggaacatcaaaaagctttagctgaaaaggtgccttacttgacacacattcctgataagaaagaaaaacctaaagaggaaaaaagaagtaaaagaagaaaaaccaaaagctaaaaaagcacctgctaaagctaaaacagccaaaaaagataaagagtaggaggtcatcatatgtacccagattacggttatgatgatggtggaaaccaagatgtataccaaccatatgcacatggtaacccaaaacatattgacattgcagacctagataagattactcctgctgattacggttggactcccgacacgttaaaggcttacatgtttggggtagctgtagttaaccctgaaacaggtgaaccattaggagatacattttatgaacatgtaattgatacagcaattgctaaagctgaaaagaaactggatattgcgattttacctcgtttaattcaaggggaacatcacgatttccaccaatctgactttaactcttacttatacacgcatgtatttaaacgaccactaattcaagctgaaaagctacaattagaaattaacggacgaggaatctaccgttaccctgcaaactggtggaaagtatataccctagcggggcatatccaaatgtacccaacagcaatgatgcaaacaggtacacaatttgcctatgattttgcattctctggctacccacaattagcaggtatgccaccttcatctggtcaagtagatgctccacaaatgattcatattgactacgtagcgggtatgttacctcgtaagaatcgtggatacaacgctgagtgggagtgccctgctgatttagagcaattagtaatcaaatatgctattaaggaaatcttccaacaatggggacgtttgattattggtgccggtattgcaggaaaatctttgtcaattgacggtgtaactgaaagtatacaaacaacacaatctgctatgtatggtggtgcatctgccgacattaaacagattgacgaagatattgatagactagaacgtgacctagcttcctacttcggaatgaacctaggaattatttaaggagggatgactcatggctaatgaaccaacacgtttcagcagttcaggttctacaggtaaccctaagcaatacatgaatgtaagtagactagagtttgaaacaaaaggtatggatacctttgtaatgaaccgtggtataaacattctgtgggaacgagcttggctttgtacatgccgaaatccgatgactcttgctcctgactctaattgccctatttgtaggggtagaggtattgcatatcaacctgctgttaaggatataatgattattcaaagtcaagaaaaaggtgtatcaaaccaagatttggggttgttcgattctggtacagctattggtacaactccaattgactctaaaattacttttcgagacagaattactgtcccagatgtggaaatataccaaagtttcatttttaatgtaaatagccgtagactagagacaggtatgtttttaagctatgatgttaaacggctagaggatgtgtatggtgacaaagggcaagtccttgtggagggtaaagactttacgatggactatagcacgaatactttttatcctaaacaacatttgttaaacacgaacatctctatcaacatggcagtaacattacgttatctggttattgatttactcaaagaaagtcgttaccagtatacgaaatttggtgtaaaagaaccactgtttgagaaccttcctagaaagctcctattgaagcgtgaggacatctttgttgatagtgaaccctttgtattagaagtagatacgaagtctcgtctagaggcactagagaaggaaaaagaagtaacagaatctaagatggtagaccctaaacgtacaggttcgagtgcgggaggattctttggaggtaaactaaatggctaagaaaggacaacgacctgcactgttcaccagtcctaaagaaatgttaggtaatctgacacgagcaatggtagatgagattctatctgatgcacaagaccaagcgttacgtgcaggtgccgatgtccaaagaatgcctaattatttacaggtaacagaatcaagaatggctaagagcggtgtaattgatttaaaaccgttcttcgctcgttctagtaagaagaagtacaacaaaaaaggtgaatggtacttatatattcctattcaaattaagacaagaaagatgtctagaagattgtatgacgatttaaggtcttttcctacaaatggtcgtcctgtaacagttaagatggactatctttatgatagaagaaaacaaagtcccgctgtacaaagtatcaactatagccctaagtccaaaaatgttacaattataccaagagagtggggagaaggtacacggaatacctatgttacattccgtacagtaaatgccaattctccggctaacagttggataatcaaccgtagtaaagtgaactcggacgatatgagtaaaacaatgttagctaatatcgacaggttaatgaagtggaaattgaagaatttaggagggtaaaagatgataccaagtttagacacttacttgtataaagaatttgaagaaagactgagaattatcttagaagagtgctatattatagacgaagctttgaaggagatagattcccaagctttagagacatttaaaaatacttattgttcaattgacggtaaggctccaaagaaagaaatcgaaatgtcgtattctttcccacaggagaagcagaactttaatgctcgttatgtgattacactaggtgggagtgatgaggagaataagtcaatgggtggtgtacagggaggctatacttaccgagaaggtgatatagttaatgaagctgttcaacttgtccgtaatggaaaagatttaattctgaacacaacaaagcctgtagctgattttttgaatagcccagatattagtttttcagaaagcgaccatttcagaatcgaaaacaacaagcctgtatttgattattccggtaatgaacacttagaaggtaaatcttttaatattgtttatactgtgaaagagtctgatgaggatgtagcaggtgtttacaaagggtaccaatcctccgataccgtaaacattgtcggaattagtacaaatatggacactgcccgctgtctagatgctatcgcaagattaattcttattacgatgcgtgacagcttagatgagaaaacaggatacatgctacagacgttacactttggagacatgcaacctgtaattgaatcaggtgagacagtagtatttggtagaccttgtacaatcgggtataaagtaactaattctattagttttgacttaaaccgacaaatacgagaaattattaccaaaaggaggatgaaagcctaatggcaaaagaaacaacaaagactaaacaagagagtccaaaggaacaacctaaaaaggttccaaagcctaaagggtacgttcatgtagatacatttttgggctatgcacaagtactttacggattaagtaagtatcaagtagcaggcttcaaagcattcatggcagggagagagtatcagcacgatgatgccgactttgttccgtttttggaaaagtatataggaaaggaagttaaataataaatggctgtagaacaattcccaagaaaaaaaagtgtcccgtccacatactgaaattactgtagatacttctggtatcggtggtgcatctaacagttctgaaaaaacattaatgttagtaggttctgctaaaggtggtaaaccaaatacagtttatcgtttccgtaactaccaacaagctaaagctacattacgtagtggtgaactattggatgctattgaattagcatggaacgcttctgatgtgaacactgcatccgcaggtgacattttagcattgcgtgtagaaaatgctactaacgcaacaatcaaaaaaggtggtttaaccatcgcatctactatttatggtttagatgcaaacgaaatgcaagttgctttggaagacaatagtttaacaaatactaaacgtctgacaattgcatttgcaaaagacggatacaacaaagtattcgataacttaggtaaaatcttctctatcaagtataaaggagaacaagcacaagcttccttcactattacagaagatagcattactaagaaggcaaataaacttattctaagtgcaggtgctgaggttgaagaccaaactcctgtaatggaatatagcttaggacaaggtgtttactctgatacaaacgtattagtaagtgcaatcaacagtttacctgactgggaagctaaactattccctatcggagacaaaaacgtccctactgaaacatttgataaagtagaaaaagctgatgttaaaacaggtgagaaatatgttgaagctctaggcggagacattgctaaacaattggaatataacgactacgtaacagtagaaattgaccgtgcaactccaattcaagactttgcgttaactaacctttctggtggtacagatggaacaatcccagaatcttgggctgacaaattccctctactagctaatgaaggtggttactacttagtaccattgacagacaagcaagctgtccattcagaagctttagcattcgttaaagaccgtacagacaatggagaccctatgcgtatcgttgttggtggtggaacgaatgaaacagttgaagaaagcatcgcacgtgctacaaacttacgtgacccacgagcttctgtagtaggattctctggtactcgtaagatggatgatggacgtttgcttaaattaccgggctacatgatggcttcacaaattgcaggtattgcaagtgggcttgaaatcggtgaagcaattacgtttaaacacttcacagtaacaagtgtagaccgtatctacgaaagtggtcagttagacatgcttaacgaaagtggtgttatcgctgttgagtatgtacgtaaccgtaccttaactgcgttccgtatcgttcaagacgttacaacttacaacgataaaacagacccagttaagaacgaaatgtctg

SEQ ID NO: 8 - DNA, 150452 bp, Unknown
  Description of Unknown: VREML85-1 complete genome sequence
tcttatctcctatacccatgaaatcttcctgttttgttgtggacgaaatacctctactttacgtgtatgaatgtccctacctataatagcgtaaggactataatctattacttcatacaaacgtacagtgtaggggtgttcttcccgtataaagctactagcttctgcaatactgaaaaccttgttaacaatgcgtactgccttcattacacaccactgtacctttcttgctcttcatagatagccatgtcttcttgtagttcgacttctctgtctatacatttataacaggtttcaaaggtgtagtcgaagtcacaatctaattcactcactagtcttccacaactagcacaacgtacctcattttccattactttgcactcccaatatattgaacaaaataatttgagccttttttagctaaagtaaacatagctgtaacttctccttgttctattacttcatgagtaattaagtctactaagttaatactactcatatttgcaataaaagcctctccacaaggatgcccctctacaagtatatgtgctcctgatgctgaacgacctctgtaagagtctaggatacgaatgtgtcctttaaaatctaccttttcaattacttggtatttttcggggtagtgttcaatataagcatccccatattcaagtaaccgccaatcagttaaccctcttgctttatctggtacccaaatattgtccaatctttctaaataataggttactgccattgtttctcctccttgttaggtattactcccataggaatatatcgtttcttataacaaaaatgtcttctagcggagtattataatgcaactctacattatgattctctttcatgtaggtttttgcataatcaaataaatgctctggacacttaaaactaaatgaaccaccatctgcatctttgcaagctatatgctcttccatagtactattgacaaaccagtttacacactttggtggataacctagcataattcctagtgcataatcttttccgtgttttcctgataatttagaaaactcagctagttgttccaatttagaaacaacaagtatgccatttttgcctacagaagttgcaaaatgctcccgtacaacacgtttaagttctggtgtcccaataaagatggtatctcttagtcccaaattaaatgccacagtttcttctgctaaaataaccatgataatctctcctcctatacctaattactcttttgatagtttgcttcttctaattgtcctccactatttcgctttaaaattatatacaggtttgacaatcttttgaatatctactgtatctttgatgatttctttgatttcgtcagcattcttgtatgcttttggtgcttcgtctagtgtactttgaacaacagatgttgtatagataccagacattgtttgtttaaactcatctaagtcaagcagttcttttgctttagaacgagacaatacacgccctgctccatgaggtgcagaattattccaatcagtgtttccttttcctacaccaatgatagagccttctttcatgtttaaaggaataacaagtctaacaccctcctgtgcatctgtggcacctttacgaatagtgttggaggctacatcaatataattatgaatagagtcaaatgagtcaactacagtccaacccatattagaaacaatcttatcaatgatagttttacgattcatgtaagcataacgttgtgctagttgcatatcatttaaatagtcatccactgcggaaccttctaagtatggcaattgtggtttaacattgacagctttaaaattcttaatagcctcttggatttctgactgtctgccttcttgcttaagtgtctcaatcatagttgctaaacctttgtcatcacgttcatggtataaatccgctttcttctggtgatattgggctactttaagtcctaaagaacgggaacctgtatgaactaacaagtagtaattgttttcgtcatctttacttaattcgataaaatggtttccaccacctaaagtacctaaagataaggtaacacgttcaataaatggttcttctgttgcacctttaaacgtcatagattctaacatgtgcttaatcgtattcggtacagtagggtgaagttcgtccaaattttctctaatgttaaacccagaaggaaccactttgttaatcactgcatccaatttagcccattcggtatctgtcgtgtcttctggcttctcaatttgagctaccataataccacaacctacatctacaccaacaatagagggtacaactcgtttaataccgtctggataatgaatcgttgtaccaactgtagagcctttaccataatgtgcatctggcataattctaacaatgccaccgtctgttaccggttcattaatcattgttgtaacctgaccgatagtgccttcatcgactgtattaataaacattttcgcatcggtatacttaccgttaagttcaattaagttattcatcagttttctcccccactaatactttcttcatcttttcatctagtctctgtataatctcttgttgttcctgagctagctttgcatggtgttcacgctgttttttatacttagcataagcaaatagttcttctgtagttagttcttctaatttacgtgtaaatggtgtagcttcaaattccattacaagtacctccttgttttttatacttaaagtatatcatgtaagataaaaagaagcaagcagtttttacactacttgctatatttttttaaacaaattcttctcttacttctccccaactttggtctgggtctggtaagctaaaaggtagtttctcctgttcttccttagataagccctgataacatttctcatgtactgcaatggttccagaactaccctgagcaacgggtaacgcactaatcaattcccccatagcttccctaaactttttatagtcttcgtcatcagcgttatcgactaggacatacacatcgcattctgctttacgtgcatttgcaatgttttcctcactaggagcatcatagaaattttttctttgtaattcaagatatttaactgctttaattagtcttttagcatagtttttagctatcgggtcaacatcaataccattttgtaaatattctactaattgatacttcgcatcccctgatgagataccgaatagagataagcaacttgtagataaaatatctccacttggaagtatcttgttagaaccaaaatggtgagaatccgccctaccaaactctgaatcacatatttcagaatgactattggggtttggagtaccatccactttacggtcttcccctctatagtccttatcttccataacaccaccatactcgttgtagtgtcctacagtttctccaattaactttccctgtctgacatgttttaaccgacaaagttccccaccattaaagcagtcacccacaatctgtgtattacatactggacaaatataaccgaaacaccccattattcttcctccattttctctttaatcatatctagaacttcttctttgttacggtgtggtatattgaataaatcaagaatatcttgttcaatacggtcttggtgcgctcgtgcattaataaccttatcatattcattaactagctctgtgtatttagccaaatcctctgaacttagtttgtttaagtccaaatcctctttagtaggtactggtctaagactgaaatagtttacacagacagtaacatccttacttgcagaacagcgaattttgtcaaacacatccaatttttccaattcgtctggttggtcaatataaacatatatagaagggataccttctgggttccatcttatctcatgttccgtctctgggtatttaactttcgcaattacatactttctgccaacagacactacagcagaacccgcagtagcataatcgtttcctaccacccaatccttaaaatcttcaagagaacctaaacccgaaggataatgcttaatcattagcatagggtcaattacttcaacaacatcaccttctctaaatttaaaaacatcaaatgtaaccggtttccgactaacctcataaccaaattttttagcaaaaaacaaatcctgagaataatcttttgcttcataatatctcacaaaatcaaaacaattttcaactgatgctctcatgtcctaaccctcccacaagttgaagctcttcatttttaaagaagacttccctagctttttctatttgttctagtatacgtacagcttgtgatgcgccaccaaaaccattattgatattcacaacagagataccagaagtgcaactagttagtgcagtatttaacgctgtgtagccatctgctgaaataccgtaacctgttgaagttggtacagcaataataggtaaatcaattaaacctgcaaggactacaggcaatgctccctcaaagccttggacagatactaccgcattactctttgtaatagcatctgtagaagccattagttttttcaagtcatttacaccaatatcatgaaacgacacaggaacatatccatttaaaagtacggttaaataagcttcgtctacggtgtctctatcagctacacccgcagatgtaattgccacagataggtcactctctgtagggtttgcacgataaaacgctgtctgactagacttgcaatacacaaaaggacttccttctccccaattatctacccaatctggttcctctagttcctctgctttttctataatttccccccaagagagaacctgtgatgtttcaaaaggtagtgcgtagaacacgtctaaaggtaattttgttaccatgatatttgtatctgcgggtacctctgcaatctgactggctagttcctgtgcagttttatttccaccaaatagtgtacgtaatttcattagttaatctcctctaaaaatttagttttgtctactggttctatcgttccatcttcctcgattccttgaactttgaatagtaagaactctggcatctcacagacaacagcagggtcatatgctgtttccgggtcacatgccatctcaaacatgttagtgtctttgttatagaaaaaacataagtccccgattctttcatctgggtataaaaagtcagcaatgtaaaacgccatgtatttcatactagtttcctcctgttattttattgtatagtttagtaagaaatccaatctttttattgctaggttcagttaccaaccatgttattgttagtgatttaattcgtggagccaaagcattttgcagataagttacatagtcattctcttggacagatactgaatagccctttcctattaaaaatcggttaactgcctctacctcctgcttgttaatattaatgtcagagataacacaccagtattgccctagctccactgcttccttaatactaggtagtaccttatttttaataaagtctacggaattttggactaactcttcttcgatttcctgttctttttcaacagtcttattataagcctcctctgctgacatcattatgcaccaactccaatttcttcatctagctttaaggatttaatcttattactaaacatgttagcttgctcattataatgtaaagctaacaacatcttaatgttattttcaaattcagatacttttgaatctacatatgcttcccgcactagtgaatacattgtgatgttatctttacagaatgcccaaagaggcgtatccaactcactttttagcacacgagttttaaacagatagtctggctctttactgcggttctcaatctgcttttctgtaattttcaagtcttcttctcggattttcattacacgagtggtacatgtaaagtctccttcggttacttccgatggtctaacatctactcgtacaccaactaaatataaagaatcctctcttgaaatgtatacaggttctatgtccacaatcttagtgaatgggcactcgtaaccattcttagcaaaccaatctgtaattaaggactgtaactcatcttgcttatcttctggaatttcatctgttaggtagtagtcctctgcaacttccccaacttcttcatagaccatctcttgtgtacgttccaagaatgaatcaacatctacagggagataaaccggagccactcttccaactacaaaactgttgattggttcttctggtagaaatcctaaaatatcctctacgtgttcccagatttcctctacaaaagttttcccatttctaatagcatctacggctagtttacctgcatgaatagcctcttccttggtatcgaaataagcacaagctctccaaacttccacatctgtatcacttgcacacatccattttcctactaaagattcattactcattttttctttcctcccattttatccttatctagaccccatatatgtgcccatttacgacaaaagtgtttatcataatctaagtccataccggtagcaccttcgaagtctttaaactcttcataaaattccgattctttaaactcatcccactttttcaattcaaccatcctatacataagttggtcaaattgatagtctggtattttaattgcatctaattcataatacagataactgtgtagtagtaaagcacgctctgtcatatttataaaggacaggttatctagtatagtattatttacaacggtcacttgttactcccccggaattgaaattattacttctatatctaacacagccataatcttaaacaaggacggtaagctaattacagttaacccgttttcatatgtagaaatggctttttgtgtaatgcctgcctttgtagctaatgcacgttgagatagaccttgttcttctcgtgcactatgaatatatcctcgtaatgtatcagataaggcacgtgtgtattcttctgtatcatccttattaacacccagttcagcaactgtttcagttaaattgattttcatgttttctcccccttgcctttctatactcatagtatatcagatacctttcagtacgtcaacaactttaaataaaaaaatcctagtaaatactaggattttttctctctttgtattgcatctgcaagcatctcactaaagcaggttcctccattatagaaagtaaacaaaaagttatacatgtctggctcaccttccacaggagtaagcacagacacttcatcattatctaaaatagtttgttcgaccgcatgataaaggtcatcccctactttgacatagctatcgtaattctcttctaaaaaccattccatgtcactatcatagtaactaggtcgttctcctctactttgtgtaaacaagctaactgctttatactgttctgcctctgtaagcttacgtaccttacctacacgtgtttccatttctgacattataatcgctcctgcattaattttattttgctttcaatgattcccttaacacactcccagtaccacattaggtgctgatattcattctcagagacttgtgttgttagaaatctacattgagcgggtattatttcatgctcatcgaaatacaataatatttggtttctatcgaatatagctattgttaattcccgttttgggcggtcactaatgtgcatctctaaaatggtatacaacctttgtatattatactcctcgtctaggtttatacttatcacaaataaacctcgctctttataacgattttcgcactccacaatcattgtatttactaactggttatgcttgatgtagtccttactttttatatgcacgaatactcactccttaaatatggtcttcatctttaaatgtttcataggaatagtgaacctgtgttctaacataaaagaccttattacagcttggacaagttgtttcccaaattgccccctcctccacattttctgaactatagattccagagtgatacaggtcttcctcgtctttcatagtttccttacaaaatggacaagtagggtatagttccttctcttctataatgtatcctttatacatagtgactctccctacttaaacgcttcgtctaaatcaagttcacgttttgcaatttcagtgatttcttcaatggcttcttggtattctcggatagttgtaatctctttaccatttcctcctaagacccaatgacgttgaatcatgtgtaaagcttttgtaaggttcgtttggtaaccgacaagcgcaacattctcgtttccctttttgtcgtaagtgatttctcctttgtcgttacgaactacacgttttacagttacgttgtctgcatcgctagtaatgcggtagtctaatactttcatgtttaacattatttgtctcttcctttcattcgttggtttcctgtacgaggtttaaatttacgtggtaaaacacgagtattgcgtttagcttcattgtatttacgtttaagccgaacctttctgtctgactgatgttcaaacatgtctgcaagagcggagcagtaatcaatctctgcacgtactttttctcccacatatctttctaaatagaatacatcaagagctactttactatagtcaatgtcatattgactaatagtaacaatgcgctcaactgtgtatctatcacaaatagagaatcgtaagtaaattattaactggtcaaatcttaagtcataatagagtggtttaagatagtccaacttaatacggttatctatttcgtataggtgttcttttgtatagtctaacagagcaataattcgattgtctgtttcattcatttctaacgtcataccttcgtcctttccggtgtgcattaatagagtctacggttacatgtcttagctgaaagcttgacgtattagactcggataaaagccccttacctagacctgtccgctaacagcggataatattatctaggtaagggctaaggataaacacaccctatacataccgttaatgtgacacgcccggttcgttactgtcttaaaataaggtctgttggtagtactgagtagcgtttttcatccactgggtttaacccatctttgccgagaactgccactacaagtttgtcttcatcgtatcctgtaactaccaagttagcccccattagttgttcatttcttgcataaagtcctgccggtgaatagagaacccaatccccaatgttaaatacccctttaaggtacttaccacacattggacagtacttaataaatgttctagcctctgcggtcattgtcgtacgaacattcccataactgtgaaaactaaactgtgcacgcaatacattatggtctacacctataccaataccgcctgattcgtcctctaaattataaagtaattctccaccctcacaccaattacacatgttgctcctccttcgctttttggatttcactttgtaaaaaattaatataccttggattttctatattaaacatatcctgaacatatacggctcctagttctctacgatacgcatagtccacaccaatacgtctatagaactcatggttaacatgatacataaactgatggaatcttgtatgctgtcctcttaaatcatacagctcctgtaataggtcacagatttgtacaaattcttcctttgttccacttgccatgatttatctcctccttacctgttacctaaagtatatcaaaacccagagcatctgtcaacactctgggtaacttttttattgtacagataataaggaagctacgttaatgtaagtaatcaaacctttttctacgtcctgtacaatcgggtactctgctttgtcttcatacatgatgttatctcgtacatataacatctctgattcaacataacggaagatagcatctgaactacccgttgttgctaatcgtatccgtttcttatccgtagggtttgctatgactgcctgatttttacttagcttacataacaacttaaacattcttgtaatgttttcatcttctaaagccggagaagatgttgttttcttcttcaatcgttgttccatataaattggaattgcttgtgcagataacttcatcgtagtatcactatttaagaagtattctgtagtagttaaaacaacctttgattgttctaaaaacttaagctgtaaatagcatcgcaaatcatcttctgagaatgatttttggtattttgaatggtctgcatttatccattctacgatgctacttaagaaggttacaggtctcttaccagaataagaaatactaatatagtcagatgtatttactatctcttttgcgcaagagatttcatatatggtagccccctctaggtcactgtcttcaccgataaaaatagtagttaagaagctacttgggacaaatcctacatggataaattcttgggtttctggtagatgagactcaataaaactacctaaaagttctttccacaagaactgctcgtccttgactagcgcttccttcttttgaagtttatagaacaaaaggtcaaacgcagtataccaatcttcggaaatttttagtttagttaattcttcatctactggaacatcaatagtagcagacgtgtcttcctcaacttccgtactatctaaatcattatcccataaatcaaatgttttacggagacaaaactctctccataatgtatcactcgggtcttctccatattgcaataacatctgctttccaattgaagtcaatgtaactttacctcgactattggtgccctcgttataatcttgaatacaccctttataccgcaaagaaagtaacatagtgttcgttgctttatcttcaataagttttaatatttgtttatagccatactccatatagaaaacagggaagttcttttgctcaacaaaagcttcgtgctccacctctaacccacgtttttgtcttccgagtttatcaattatacgaagcgcctctaattctcgttcctcaatagtcacaacatactgactaattttattttcgtaagctaaagcggtattcatctcttgcaaaatctgtttaaataaatcgtttgcatcttttgccttctgagtcttaaatgttctgattgtcgtatcatagaaacgttcgtgactcgaaatagcgaactgcccaatatatcgtttaccttttaaatttaaacggttttcgttacgattccctagagtaaacgttacgtagacagactcactagacttagaaaaataaatatcttgaacaactatgccgatagtttcaagctcgtttatacgtttagtaaaatcactctcatattgtggtctgtttatatttttgcagtgctttctatagtgtactgcaacagttttcgattcttttgccacatccaattacctctcttatctttcttcttttgcaacgtatgcttctaatacaatagttctaatcggtgcttcttcatgtacttcatcttttaccttcttgattacaccttctcttaacagtccttctcctaacttatgcgaagcttctagcattcgtaagtttacaagttcatcactgtcaaatacactcacatctaaccttactctgtaaggtaatacttgttggtgtacacgggtgactgttaggggttcccctataagaggactcttcccaactcgagaaaatgcccagttatctagtttttggttaaaacgcttctttaatctgtctaacatgttttcacctccatgtatatagtatacatgttaagccttacaaaagtcaacaataaaataaaaaaacatacaactaagtatgttttttcggtacaaaatatttctcttgaatattaccgtctttatctacaacaatgccatttaactgtccgccataggcacaagcaccatcaataaagactgtgcggtctcctaaataaatatcacagttattgcctctatgaaagttaactgtaggtgtatgtcctacaataatagttttacttgtttcgttcttttggaatggatttggtctagtccaaagcatttcgtgttcctctgctgttttccattctggttgtctccatcttggaatacccccatgcacaaatagcacgttaccgaactcgtagtaaggttctaagagttccaaggtgtcttttacattagagttattaagaagctctgtacgcaacgctagggcgctaagagaagctgtcttagttcctagaatagaattagcagtctcttgacctccttgataataccacactgagtatatctcttgcaagtcctcataatctggttctaatcttaatggaaaactaaggaaatctaatagcatttggtcatggttccctttaattgctgtgccaccagaagccatatgttcgtaaacaaaacctagaacttcttttgattggagacctctgtctacataatctcctaaaagaaccaattcctgttcttcacgattccaattttttaataactccataaattcatcgtacataccatgtatatctgatactacgaacgctttttctttgctcattaatcgtcctctactttctcaaaatatcgaaagaacgcataccaatcatatcgttcagtaacctgcttactctcgtgcataaatacaaactcaacgtatttgtgtttaactgcatgagggtctactggttcccaaggaagcctgcgaggataatcataataaacttttgttggaatgacttctcgcattaacaatttagggtaccgctttttaggacggtacctctttcctaaaacatgttcgtatgtcggtctcattctattgtaccatgtttcgtataagttaagccggactcgttgaaatgcttttccttttcttcaatcaggtcaatacactctttaattgtgtatggtgtcccaaaagggtgcaaagttaattccggtgagtcaatgcctacatttagtaaattaggttcttgataagccatctcatgaatatgtccatgtaagtttactcggtttcctcggctaccaataatgagtggatagtgcgttaaatggatgatttttctttcctgctttagtattacgccaacatcactccaaaatactcgttcacgtaattcctcatcccgattaattgtttttaaaagcttggtactgtcgtggtttcctttaaccatgataataataccgtttagcttacgaagaatctctagagtatcctttggtttctggttcatagcaaagtcccctagatggtacacagtgtcttccggacgaactcgtttattccatgtcttgactaagtaatcgttcatttcgtccacatcagcaaacctacgccttgtctctacaaagccatcttctccacaaatattgtgatggttgaagtgcatgtctgaaattacgtatgttttcattctagcaaccctcccaattcaaagttatcgaaacactctgcattgtatacattttgaatggcattccgatagaactctacagtctctagactaactggggtgaagttgtgtacatctactcctacattaagtccgtcacgtttcaccttttgtttttcatgaatatgtccaaataagccaaaatatccatctttgattttgtcttctgaataactcatatgggaaggctcatggacaagaactaatttttggtctacaagagtgacaacttctccttttcgaacaaattcaaaatatttttcttgttccggagtaataaacccacctttaccatcccgttcatagttaccaaataataaatgaattttacctttaagctgtttagctacttcgaagttaccgaaatctcctaaatggtaaacggtatcctcttcatctacaacatcgttccaccgttctatcatagctaaatcagcatgttctacattatcaaaatacatacctcgcatggagtatttgaaagtacgttcttgtccaaagtgtgtgtcggacgtaaaccaaatcttactcatttacatcatctccaaacgttcataacatttttttattaccaaggcatcccacattgcattatgttttacaccctccattgtttcatcattaccaagaaggaacgcaaactcttcacgagaaatatcagggtcaacgcctttaatcttaaataacgtgcaaatgtcaaagggaatatagtacacgttactgggtatagagagtgcatccccaaataggtggttgaacaacacccagtcgtatgaaagacagtctgaccatacttctacagaattaaactgcgctagccattcctgtagtttttgtgcaatatattctgtatccccgtagtactgattttcttcttctcgtaggttttcttcccctactaaattatcaagcacatgcgcctgtaaccattcgtctacttgtgtttcatcgtaatcgtttaactctgcataaaatgatacaccattttcagctataattccaatactaattaatgtagtgtctttatgcaatcctgtaaactctgtgtcaaaaaagattttcatgtcttactcctctatgcagtttaattataattatgttgtgactattgatagaactaacaattgaagataatgaactgtttggtcaattgttaattgtgttttggggtctggtgctatcgaaggaaaccatgtactttgtgctttgatatagtccattacaaaatgtggtaaccatagaacaagtaaaatgtgtgctaatgtaatagacaaaccaattaggtaacctgtcatagcaattgtaaaagtccaaatagttgcatggataaataacacatataggtctcttgttttttctcttgcaatatattcactttgtagtgcgtaatctcctacagcatgtgcccctactaacataacaaacatagtaatatatggtgtcattatattctaccaccctcatctaatagtttctctaacggaatgaactctgttgtccgtctaagaacaacatctcctgattcctcaattgtatcaagccaacgtttactaccatcactcatacgaaacagtcttaaagggtatcccatttcatcatattgtatgatatttgttctttcgtatacgtaaggctctggcttgttttttaggaagtcgaaccaacccattcctacccctcctcagttaatttaactagtatttttaccgggataatttctaagtccttgtattttctatcgtactcgttacgctcccgtaaaattcgttttaaagtatctcttctacttacagcagaatcatacatggtgtacgcttgcgcatctgagggactagaagaccacgcatataaagtcagccctgctacataatacatatacatgtcccattccatgtcgtatactcttataataaattgattgctcatttaatctacctcataaccattttccaccgcacggtaaaactttaatatattacagtattcaccgaaccagtcttggacgaaggtttcccagtttcctttgtaataatcatcaatgacagagcggataacatattcctttgctctatcatttctggtaccccctgcattttcaataatctttgctataaaataaggaactctctcttttttcataattagtcttccacctcttcataagtgtctgcaaagatgtctggtttacatggataaacttcgccttgaacaccttgaatgacgtagtctcccacagaaacgtgcatccaaccttcaagtgttttaatataaagttccccttcttcaaaactgtaatctgcatttaatatccattctgggacataatagtttcctgtggaatccataaaatctccatcaaatttaaatgcctcaattactactggtttctttctgtacttcatatgttacctccgtatttactatattttgtagtataaaagatacttctataccacgaaagtctttgtgtggcttagttcgtatacttttacattcaactgcttgttcaatactttttagcatatgtttggcataactacctacaaacatataatacctaccatctattgtatatacacgtagtattttcttagtttttgtcattgatagcaccttcaatgtattttaattcacgcatcaacttaataaaagaagcagtgtctaaaataattgacatgtcatcgcttctatcttgtatagtaatttctaccactgtatcttcttcatcaagactacggcggtcttcctcataagttactttaacgctactgacaacgtcatcatcactatacaatgcgtaatacctatttgtacttatttccactccaatcaacccctttcttttattggtctagttccgtttccttgcacttttgttcctctatatttaatagcacagtcagcgtgctgtagtctccaatagccattctttctttcgaaatgtccttgacctttctctacaaaggtaccgcacctgtagcaataacccggatacttgttgcgcatagtagtctcccctttacacaagttctaatgaaatacttagtataccagaatatttatcttttacagcttcctctacttggttaactgcttcttccagtgaaatagttgtatttgtatcctcggaataagtcttagctaaaatccgtattgcatgaacttgggaaacctcttttagttcaacagaggtattgtcttcgtcatccacataggcttgctctttgtatatctctaaagctttgctaggactataggctgatatgagagcaaaataaggactagttacttcatagaacttaattcctgttaagttaaagaaaggtgttacgtagtccattacgcctttttgcatacgtaactcacttgaatgttctaggttgttatagtgctctttttctactacgataacctcgactactttacctttttctacttcatttggggtacatagtctatctctagctccaagataactacacattagtgcatctttaactatcgttccggaagcagtattataccctgttttataaaacccatcttcccttactgcaacatataattttaacggctcactcatactagttttcctcctctgtaatagtatcatagaaaatcatcccaaccgactcccacgctacgcataaaacaagacttattacatagtaagtatcttttatgatactcatttttaaaactcagagtgcttccgcactctgaacaatataacttcacttttttgtctgggtatccatcgttgagtatctcctgcttaaatctcttaattccttgtcgtctattcatctataacctcttttccactagcacagcaaacgaccataaatcttcattaatttcttttatctcccgctctgtaaaactattcttccaagttctacaatgcttgttatttttaaccacggaaaggtgggtataagtctccccggacattgttttagtttgaacgagataatatgtttcattaacaaccgttaacttaacatgatacaacggttcttcaaccttataaccaagaatacaagccctctcaaaatcatagcgacaatacgctatttcaaaatatctactcaatttgtctaattccaaagtatccggtaaatttactgtatcaggtgtgttattccgaaattcttggattgcatcactaggtgcccaattacgtttcgttacccaatcaacaaactccgccacaaaatttggtataactggtttatctacttcccctatctttctcattattgtaattccggcatttataccctcgttataacaaaagtctcttatatcagttcctgacatcctatggctttctaattccttaatcgcttcttgtttattcatagctactccttctctaaattctctctcttggctaacaaccggaaattttcataaaaataacctaaagtttcgtcaccgatagccccatcatctgcatcagtgtaaaattcatctttaactccgttaactaaaagtaccccgtcatcatctattccttcaacaaaatatacctttgcttcatgtgtacctttacgaataactaaatccccaacattcacttcccatttaggtattggctctacttcatctggcaatttaattattgtaaagtgcgttttatactctgggaagtcatcgtctaatggagtaccagaatatggtgcttcactaataggaaaatcccaccaaagaacatcccccatgtcttcatgccatttatctgctcgatatgctataaccctctgagagttgtcctgataatctttcacaggttcgattgataaccaagctcccataaactcttctgtattattagcaatccactttagtgctactgtttcttgtagacttccggtaaaaggttgggacttagttttataactaactagaatttccattatagtatcaaagtctgtatccgggctttctttccaataagtgagcaagtcttgcacttcttctggcaaggagtaacttattatagcctgctgtttttttaacgaacgaatagcattttgtaagtaagcttcttcgacatcccgacttttattaccatttaaaacccgctcaatctcatcaattgcatgttcaatgtgattcattattattcctcctttaaatccccaaattttctgtctaattcaacaccaaattcaaattcatcagctttcttcgataatttgcacatatcttcataatttttcttgaagttcttatgaataatcggagaacaataacctgtctctatccgtgctaatgaatacttgaccagtctagcaattttatactctaatgtttggtaattaacaacaatatttaatttattttttgggttgtaccactcatgtgtatatggaggcattgtaaccctattctcaaaccctaaacctgtcaacagctttttgactgcttctgtattaacttctaatgtgtccatgtctacctccaccagttaggttctttaataatttgccacgctctttttagttgttcttcgttgaaatgtccaaaatgacaatcctctttaggaataccaagcttacaagctaacacactgtacagctctcccctacttatctgtctagacttccatacagggtcaaataaactgtgacatagttttttccatcgtttcataggtggtgtagctaaaatacctagtggttcttttggtctgttcttgtgagtccctacactagcaccacaacctgtacaataataacatttaccattaccgtaaactttcccatataatacttcattacttgtccaaataactttagctccacagtaagggcagttatctggtactaacattttatccatgatttgttcacctctcatgtatacagtatacctctatggtatcagtaagtcaacactttttttacaaaaaaaaagaacagcatttctgctgtcctaaaaatcacaccaatcatctttatcgtaagaatcatctgtgtagtgttctttacctttaatgttattaacattaacatgctcgtcttcctctggttgctcttctttgtttttcttaacgaagtagtaaccaatagagaaagctatacccccaagcaacagtataataagagcgataaagaatttagcaatgaagaatcccattacttgtcagtgtccacgattgcttgtccgtcaccgattgtagtagtaacccaaccgtgttccttacgagcttgtgcttcttcgtaacgaactagttcatccgtaacagattctgcaattttcttgttagcttctgcttgtgcattagctttgtctctaatagcttgggcttctgcttgggctttcaaagtaacttttgtagcctcagtttctgcttgtgttttttgagttttagcatctaactcagcttttttagcttcttgtcctgaacggatgattgcatcaattgatttttgtgtttctgggtcaacgtcaggtacacctaccgttacgttttcaactaagaaacctttaccttcaactgaatcagagaaacgagctaacacttctccctcaacctcagaagacttacctgaaagaacatctaacaaactgtacttagaataaacttcacgagcagtcttttgtagacgagatttcaaccaacctttttcaatgtcctcagatgttacgttaccgaactctttgtacattttagttgcttgtttagggtctactttgtagtcatacttaatgttaactacagttttcttaccgtcagatgtagaaaccgcaacatctttagcttggatagtttgtaaacggattgggtattgtgttactttatcaatacctacccatttaacaccgggctgtaatgcttcggatttaacaccaccgttaggtgaaaaacgtacacctacataaccgttgtcgattcgttcgaagaaacggaaagcaccgattgtacctccaatcaataaaataactgcaaccactccggctacgactaggcgtttaaacgtcttctcggtcataaaaataattcctccaatatttagttttttatgtgtaagttttccccttacaaatagtagtataccttacactgtataacaagtcaacaacttttttttattttcttgtggaaaataatttaatgggtgtatggtcttccccttcaagatacttaccatcttcccacaagaccactgagcctttctctaggcttctctgcacatcaatgatacgttgattccatgaaccacggaaaacaaggttagggttgaatttatcctgctcaaaacgaccatctactagtacatctacgtaagataataattcaagcttatcttcccagttttcagcgttagaatctgtaagctcttcaaatgtgtaacctgaccatgaccatattgttttacctgttagctccgatttaatacgtttagctaaaggcaataagacttgtgtatttaagaaaggttctccacctaacaaagtaataccatcacaataatcttgtgaaatatctttaaggatttggtcttctacttcttgggtgtaatctttaccccaactaaagttttgcgcctttttattgtaacatcctaaacaattaaacggacaaccagagacgtagatgcttccacgtaccccgataccgtctaccattacaggaaacttgtaatcagcatatttacccttagacaatctttctgctgtccatgtcattgggtctttactcatctgtatttccttctttcttaacatgtaagccttcgtcataccctgattgggtaaacttagcttggcaaattgcacacttataggctttgtaccctagattattatacggaaccacttggtcttccccatcttcatcttggtgggtacacgctttttgtagcgcatttagtatttcgtttcgttgcttgattaatcgttctttctttgcaaggtgtctacactcttcatgtagaattgcagactctgcaatggctaaaagattttgtaaagaggaagctgtactcattaaattgccacctcgtaattaaatcttccgttatgtttgtagccttcaaccttaagttcagatagtgggcactcaaagaagttagtcatgttagcctcttcccaaggcaatactagcttaggttctgcgtttagaacttcctctgtcataggagcagttacttgttcgacagcttgtaccatatgacggtcgtagatatgtgcattgtcgatattccagaacattgtacccaactctaagccagataccttagacataactacatgtaacgcatgatactgcaatacgttaaatggcagtcctaagcacacatctgcactacgctgtttaacgtgtaagttcaacttaccaccctgtactgtccagtgagtagcccatacacaaggttctaatgccatttcatctaagtcttccacatcccatagagttgtcataattctacgagaacttcgattgtattttagttgatatagaatagtttctacctgattaaacttaacgtagcacttatagtcttttgtttcagggttaacatcaaccataatatcctcttcgggaaaaaagtcttccggagaagctacataaaattcattattcgtgtctagttgcactttacgttttttattgcgtaactgccaaccataagcttttccgattgtaccatcttcttgttcccattcgtcccaaatagttactccacgttcttgtaaccacttgacattgttagacattgcttgccaaatccactctaattctgtaaatgcccacttagagcctacaaacttactcttaagaattggcagtcccatgtctggtgtaatttcaaagcttacaccttcaattgcatatgcaggagcaggttccccatcttcatagtgtgctcgtacttcatcgggattttgcaaaatacccttttctttgatggctaacacaaggtcagcataaattttgtcaaaactcatgtgtgttctccttttctatgttcgtctaactatattgatagagtctgtatacccatttcttcgtacccactctgtataactgttgtgctcttcttgcgcaatcgcttttaaagaaccataccacttcttgacttcttcccgttttttacgtttgaatactaatgatttgtttttatctatgacgttgataatcttacttactccaccagtattatctataagcattaatcgtgaaacggtcggttttgagggaaacatctttttgcattccctacatagttcttctatttgcccacctaatgcacgcaaatcagatactctacgcccgcaacgtatacactcagttccataagcctgctcaaaatattgtgcattaatacgaggaaacttttgcgtaagtcttagattagttgaaggtgttttaactctttttcttagtactgttttgtttttcttaaccttaacactaactgggtcattaccatcaaaatcaaaagaaaagctaattgttccagaagggctaattgttggggtaactacattgcgttccactcggtctgctaatacccgaacatctgttatacgaggacgggttttctttgtgaataatcgtcctcgtgtgtaatctataccttgcatattacaaacctagccatgaacgtactttgctgaaaggaggtttcttttcaggttccttgtactcagagtttgtacgttttaatttatcattgtagttatctgcaagtgttaacaattcatcaggatttactgtttcacaataaaaagcaatctcttccccagttagctctctattttcttcaatcaatttatcaagagtcaaatcgcaatactcatcttcccagtcagctaagaagtacatacgttccatgacataatctgatgtttcatctaagaatataccgaatagaattgggtctttatctcgattatcttttgctacttgttgacctacttcatctgtatagtctgtaaacatgataactaagcggtcaaatttatcttgtacacgttcaattacaggaacaacttcatctggaatttcacgaggaaaatctttaaggtcagctagtttaactgaacgattttccacattttcaataaagttttcaatatcttctgaatacacaaaagttgtaatgcccatatctctaatttctttttctaattggattgttctaatatgatggcgtaacaaagaaatctgtctatcttgctttgttttaattgccttttctagcatacgtaatgcgtttgcgtaataacggtctaggtcggcatcttgattttcctttttattttgttttactcgttcgaagaactctgtaggtgatagttcttctaatggtttcgttgttaagttttcagtcatgatacatcctcctaaaaaaaatattccttacaggaaataatatatcacctgtaaggaataaagtcaacactatattaaaaaattgttgtaagcatttgactgtggtctaacgctaatacagcatccccagtaacacgcccatcacgatatagaataattgtagtatcatcggttgagatgtctactttagcctcgtgagaggtgatggtaaaccatacgtaatcactatcagattcgtcttctttacgttcagcatctgaccgcatttgagctatatacatttgtgcaagattatgcccagaagggtctctattagggtctccaaacactgtagatggactaataccttcttcttgtccgtctaatgaaactgtttctaaaatactctcagcaagcatattaggggtatctgtggctcctaaaaaagcgttaggtaattcgtacacaccttcttgaactcggtgtagtaaaatagtagcacctacttctaattggttccttaatacaactaaagaaacgttaaatcctactttttcaatcatgttctttcctccatttttccatttcatttattttatcaggcaatgttcttcttgttaaacagcctgtagtacttacatgaagcctttgaactccattatttttgcctagaacttcgtctgctttcttatagagcatgtctgtatgttttggacaagctatctcattaaaagatgctccgttatctgctacacttacaatcccgtttgcacagaatcgactacgacaacctatacattcattcgctagcttcttcatgagcaacctcccactctgtggcttcccttaactgtagctgtctagcttcttctaaaggactgatataatcaggtagctcatctaccggtgtaaaacgttttgtcccgtcttcaagtataccataaaaatggtctgccggacgtgcaaaaactgtgttagcatttggtgaataagggttaggatacattcttcgatacaatactaactgctccccagtctctgtatgaagtacatcatcatattctagtgtagcataataagcacccttataatgacgaaaccacgttccggctctatgcttatattccattcctcttccccccccctaaagaaaagctagcactaggctagctctttatttttacctttgattaatttaccactttcatcataccacgcatagatggcagttacaacatttgtttgatataaaacatctctaattgcaaaccagtagttaccagaaccgaaatctagtaagaaccaaaagaagttacttgcaaaccatccccaccatgaaaagtcaattcgcataatcattaagaattgagatacgattcctagcaagtaagcaataatgttaccccaatacatgatgttacccattagggaaccatctgtagtaaagccgattttatctccatacataattaagacaattaaacctacaattgtgaatgctaaagtaaatactacccaaaaagcgttcatcttacctactttaatacgcccatcttcatcttgattggattcttttgtccactcttttaacccaataatgtgtgtaataccgtagtaaatacctgcaaaagccaaaccgaaattcccaaacatagtattaataatgatttcaccaacgttagagctaatacctaagatatttcccattttaggatagcggtctgctaaagataccacacaaggtacacctaagcagtacgctgtgatataaaataaccagttagttttatctgaccagtcggtgacaaacacccctacaaccagtcccagtactaccaaagtgattgcgtactgtttgcgccatttcccattagctagtgaaatattgtccataaatgttttcatattatttctcctccttgttagtccaaatttcgtcaacatataattgcaacgtgtcaacggtagttccttctaggtacttttcgataattttcttgcaaagttcataacgagtttcataatcactcgcagttacttccacatatgggatatgattctccgcatataatttcttcaacaggttttggaagtcttgtctacgtttttcatcaccgattaaacgcataccatcgtctacccatttagtcgaattatctaacaaaataaccaaatcaaagcggtcattatcaatcttatcttgtacagatggatgaggttttccttcgtacgtaatacagaaggcttgtgtggctacgtagtctgtatccgaaatagtaaatctattagcattacgtcttgcaaatcgaacgtcttgatagtgaccgttagcaattgcttggtagtcactgtactgtaatgcactctcatctccacctaattcaagttcacagtagttgcgaccgtattcccaaacagtcgtagtagcaaagtagttacctagcttatctaccatcaaagttttaccactagattctccgcctgcaattacaattgtaggagccaatgcttcccgactagcacgaggcagatagtcccagtacttaatagggttattacgtacttttgttgcgctaatgttaacattagaacgctccgggtctactaacgtagtaggacagccaaagtatttttggtacccttccgcatcctgtggttcacttgaaaagaatgttgcttcttcccaatcaaaacctctttcagccaacacacgattacctgttacagtctctttcacaaggtttgcccatgcttcccatccgttagggtactctggaatgtttgattcatctacgagtacaggaatgataacatctcgttgaacttgaaaagtcttttgaacaattcgtagtttgtctcgtgctgttagtggacgtttcatgttagaatccatgtataaacggtcgtctcgactatctgagtggcttaccactacaacaagagtctctacttgtgtgcttgctttttgaatcatatctacatgtcctttgtgtaagggataaaatttcccaactactactccgaactttttcataccttattcctccttttaggtattttttactataattaattataccacactttactagttattttcaatataaaaatagccataaattaaaccaattgttagtgcaatccacccgataacaattaataccgtagaaaggattcctttagacaatttggactcaacaaatttatcatatgcagtataagaaacgttaatagcgctgtctttacctctaactgactgtaacccattttcactagcatccgcaaggaaagttaaatgtaacttcttaggtacgccatagtaggtaatacgtacatctgatgataagtacttagtagttatatacttgccatcgaacccagtaaacttgttaaagtcgtatatatggtcgtgtactttaactttatcaacctgtttagtcttagagccatagtatacccattcccagtaagtttctgttttagtttgtgtattacctttctcgtctacataactaactgttctagtccgcatctcatagtgttcctcttctgcaacaactttcatgtattccccaccaatacgaggaaacgttactggttttattgctatgaaatcactatgcgtataaaaggtaccttgttgtgtatctaatacgtaatcatacgtttctttatcatctgccggaatagcagtttcgtacatttgattagattttatccggttctcttctacttttccatgtacccatattcctagtaaactagttaaggtaacaattagcataggaataatgatgaaccggattctaccatccacccgcatcatttgctaaacaggtctgtatgacctttaggctccacagggattgttaacaattcataatcttgtacttcatacccttgcagtgcaagtaacttacgatttaagaaagttctagtgaatcgtttataatctgaaatttgtcggttataagctttacgatgactagcaactcgattctctgtaatactgaactctttcattgcttgtttgtaattatcctgtgatttaagttctggatacttttcgactactgcatttaaagtcgttttagctgagtctactttaccagtttctgcttgctgtcttgctttaacaataagttctaacgtactcttttcatagttattatagctctcaatagcatctactaagttttggaacaggtctactcgtctgttttcctcagtatttaaatccccataagcttgctcaatagatacttcgtaactgatagctctattttctacatgttttactccaaaaaatgcaacaatacctaataataaaacccctactagtgaaacaataattgtattcgctttattcatgcgcttttcctcctaagaactgtttaagaatttctctccaattgacatattctgttgtatgccctttgtcatcaatgtaaacatctgcaccaagcttacggctgttatttccatatgctttcatcaaatctagatgattctcattgatgtagtgatagttaataccacattctgccaaaaaactttttgcttgttctaactcttcgccttcacgacatgtccatataagaatttgttttcctgacttgtataggcggttaattacttcttttgcatgtggttgtagccctacaatatttggaaattcacttcttacaatagtgtcatcaaagtcgatagctatgtatttgcactttgacaaatctttcatttgcttctcctttcaaataaaaaaggtatacccttctttgctacaagaagaagtataccttatgagtatcactaagtcaacactatcttacaaattatttgtaagaattttttatttctttaatttttcccatttgtacacccgtaaaactaatacctgtagacgtttctacgtaaggtaatgaggttacggacttactaactagataatctctagcggatggttcattatcaatattatgctctgtaaactcgattccttcacctttaagcatattttttacaaatgagcaaccaccgcacccattcttagaataaactgttactttaaccatgtgttacttcctcctgtttaaaccattttgaacctgtaaatgctacaacatcgttagctaaataaagcatgtaagttaacattaatacatacacagcgtgtccatgaagagctgtttgaatccatagtgctactgacattaaaccttggaatgtccagaagtaatactgtgcacggaaccctttaacacataatactgctccgactaaaccaatcattgcacttgtagcatctaagaatgcttgtggagaatgcaaaataactgtatccaacagatacaatgcaacccaaaatacaacaacaagtaccaatgttttaagcatatgtgctcgattcatcttacgaggtttcaaaccttcattccaacgtttagagaagatgattggaatatccagtaaaataatatatgctgattgcataataatgtcactatagttgcctgttacacttgctactccaataagtagaattgcggaaataaaaccaagtaaaccattaattgatttacccattgtaattgttacggtacaagtaaaaccaattattcctgcaatagtggcagttaaacctgttacagtaataccttgtccttgtaataagggtagaataagtcccgtaaacacttgaataaccattcccacaatccataaaattcttgcaggtttagaccatccagttagtccgtctctataatattcatatgtgaataattttttaatatgttccatcttactgttctttttagcttccattaatttgttactcctccaatgtgtattaaatatctttacgctctatatcccagaaatgtgctacaacatgataaggtacatcaattccagatgactttgcatgattatagaatttcataactgcttgttgattgctttcttcttggtataattctttgtatgcgttaacggcttgtccctcagatatacagcctaattcaaataatttatctataatttgacttacgatttgctgtctatgttctgggttgttaacaaaatcaatctctgtaacatcgagaataatttttggaaaacctaaatctctttccatccaattttgatagttctcatgatgacgtttgaagtactcgtataattcggtaccttcttctactttttcaaattcacgagcacgagcattaattcgtctgatttcttcttcaaaagaacagtttaaaacaaccattaaatctggtgttttcttaggaagtggttctaactccttaagcattctctctagtaaacgatgatagacaccttgttccatttcgttcacatgtccttcttgtactaattggtctaagaagatactatcttcaaatatagaccggtctaaaataccattatccacactcattgcttcttgaatcatttcaaagcgtttggataacatatctatttgaaaaagtagtccatattttgatttgtcttggtagaacaattcaagcattggattctcttctacaggttcataaactgcttttgtatctaataggtttgctaatatttctgtcattgatgatttacctacaccaataactccggctaacgtaattatcataaccaactcctcggaatatttattttttgacaatattaagagcctgactagcaggctctaataaaccttacatatgttttacacgtgcatctatttctttcttacgtccatgtgcattaggacgagcttgtggttgacctaaataaccacattgtcttttaacaacatcacatgttgcggggtcattattaccacattgcgggcattcatagccatctgatgtagggttaaactctccatcaaaaccacattcatgacatttatcaattggggtgtttgttccaagataaccaactttatcgtagctgtagtcccaaacagcttctaacgccttaaggttatgaactaatttaggatactctacatagtgaataaaaccaccagaagcatattttggaaactctttctcaaagtcaatcttttcaaaaggtgttggagctttacgaacatcatagtggaaactatttgtataatattctttatctgtaatgttctcgatgattccatatttttctgtgtccatacgacagaatctatcggttaggctttcacttggtgttgagtagatagagaaccagattcccgtctcttttgtccattcatcctttttatcataaagcttacgtagaacatctaaagcaaactcttttgcctcttcatgatgtgggtctgttttatcttgccaatcaccaccatagaacatgctagcaacctcatacagcccaatatagcccatagaaaccgttgcacggttatttatgaacaattgttttacatcgtcatcatcggttaaattagccccaaaagcaccatgtttgtacaagataggagcattctttggttgagcttcgtaagtacgttcaattcgataaaccaaagcatcatgtaataccttagctcgttcttcaaaaatttcccagaagacttctttatccccttctgattcaatggcaatacgtggtaagttaagagttactactcctaaattcatacgaccagagtttacttcgtttccatgttcatctttccatccttgtaagaatgaacgacaacccataggacatttaaacgaacctgttagctcaacaattttgtcatagttcaaaatatcagggtacatacgtttagctgaacattctaatgctaactgttttacttcatagttagggtcttctggtttacggttaactccgtctttaatagtgaacaataatttagggaagattgctgtacgtccttctgtacctagaccttggatacgtactttaaaaatagctttttgaatttctctttcccaacgtccagtacctaaaccaaaaccaatagacgtgaaaggagtctgaccatttgatgtaaataacgtattaatttcatactctaggctttgcattgcatcgtaaatatctttgtttgttttctcgattgcatatgtttctggctcaggaatacgataacgtttagcatctgtcatatgtttttgataattcatttcagcataaggtgctaatacttcatcaatgcggtcaaacgaacaaccaccatattgactggaagccacattcgcaataatttgtgctgtttgtgctgtagctgtttgaatggaatgaggtgaaccgatttctgcattacccattttaaacccgttcttcaacatatattcaaagtcaatcaaacaacaattagtcattggacggtaaggttggtagtctaaatcgtgataatgaatatctccacgtaaatgtgcgttagctacatgaggagggagcattttaagaccctcaactttattaactgtacctgctgtaaggtctcgttctgttgcaaaggtatttgagtccttatttgcattctcattgacaatagttttgtccttttcttgtagcttacgtagccttacattaatgtctgtatcacctgcacgttcagcatcacgtaaagaacgaaactcaatatagtttctagctacgtttttagcaaaagatttcattaattcctgctctacaatactttggagttttgcaatatcgacacgtcctgtatcgctgtaatgcttcactacaaagcgtttaacacgttcagctataatctctcctaaatctgttttagcgcccgtagcatccttctcagctcgtcctacggcacgtacaatccttccttcattaaacttgacagttcttccgtctcgtttaactacaaaaatctgttttgtcttaacatctacatcttgtgttgcttgcactcaaaattccgcctttcttacaatatctagtatacttagtatagcataacaatacttacagtacaagatgtaattgttaacaaaaaataaaagactacaaactaagttgtagtctttttcaacaaatattacaaattgattaattttttctcagattagctcacctaagaaatcctcaccatcatctggtttcttgtgcttatactcatccgttttgagcattaggtacttgttacctgtttctacttgtaacctctcaaaagctctacggtactcctcagcactagatgtagcatctagtaggaacttagcattaaggatggctaaaaccgctagtagctcttctcgactaccggacatctgtaccttaactttaccatcctcagtcgtataagctccgattttattcttgattgccacagttacacctcttaatcttttaatttaattttaggcatagcttcaagaagtttattattaaactttccggaaataacagcttccccaagttcatttgttaccacggaaatccagtaaggagacttcggtttcaaacgattgttattaacatctaggaatgctctaaacaatcgagggaaagaggttactcctactaatttactagcaaggtcatgcgcaataactttcttagtgaaacgctctgcattaaatgattctagcgtatacaacaagaaataaactccctgcaactgtgtgtttgacctaaaatctgttgaatcaataaacttttgatatgactgagcaaacttgacatattctttatagttacggaaacggaacgcaccatcacgtacaacatctgtttttcttcctgctgtactactataacctaacgcagtagaaatagtagaggacacccgtaatgccggatacgtagacatcaagttcaacagttgtttataactttggtatcctgattcggcatacttatggatgtaatcttcgaccttccatgatttacttgtactattcaattctgcaacatcaatgtcactgtcatcgaacgtataagtaatgggtaacccaagttcacgagctacagctaaacggtgttgtccgtcaataacttccatctttcgatttactttaatctcagtaagaaccccacgtttcgcaattgagtcccgtaaagccttagaaattttaactggtctgtttccttttagttgtttgaatttagacaggtctgctgtttcatagacctgttttactgctttatcttgcttcttttctttagacacctgtcatctctcccttaattattttttgtattgaatgctttgacttacctcagtgattttcttaacctttttaaatacattaggataacatttttctaaggtatttcggtctacaccaatgcgttcataggcgctaataagtttgaaagttccgtattgagattcaacttttgttttcttaagttgaatcatttgttcaagaatttcttttctaagttcatctctttgctcgtttaaagaatcaagcaactcctgaacacgtttgtattccttaaagttgcgctctaattctttttcttttacttctgtagttgttagtctcatgaccatctctccctttctttactatactcaaagtatatcattacatattataaaagtcaacacctatcttacaaaaaattgccaaaaaaatatttggcaatcagtttttgtcatcaggttctaatagcttgtccgcaggcatatcaaaaatacgagctagtttagcttgattgtttgctctgggttttttgattccatgctcccaataggatacggttgaccaatgtacacctagttttttagctacagaacgcaaggattcatgcttttcttcacgaacacgtttcagcaccaagggttttggcttgctttccacgattctcccctccattctatatataactacagccctaggaaaacctagggcaagtagattatttaagtgcttcttttacaaagtcatattctggtttatttaacacagacaacatcatttcttctggggaagtaatttctccgcctaacacttgtgttaagatgtttgtggagaacccagatactaaagctgttcctttttcgtcaaaacgtacaggtgtattatcatgacgagagtttacattccagaatactacagatggtaactcgtaacctgcctgttcgaacttaagttttgcttgttcatagttagtgtaacctgccacaccttggtcaaattccatatcggaaataataacgatttttgaaggtaattcattttgtggtgtgtggtttttcaccgcagtagataaaatcaagtcgaatactttttgtaaatttgtatttctagcattgtatgaacatttatcataagccttcatcttatccataagtgtacctgacaatggtaaatttactaaacgaggttgttcagaaaatacgatgaaatgacctttgaatgcgccacttaagcgttccgcagtgtagatagctaagccttctgcaacttcccaaggggtaacattttctgtaccaccccatgtcatagaaccagaagtatccgcaactacaattgcattatcttcaatatctttcaacacatcgtccatagatttccatgttgcttccagtgaacggtctaatgttctatagtaacttctgctaccataagcccgaattacttcatgaggtaacatgttctttgcattcatttttacttccccagattctactttagaaagtaaatcttcatattcgtctggcatgtgtaattgcaaagctttacggtatttgaacaatgctttagaggatacttggttcaaatcaatcttatggtattccttgcttgctaaccgaacttcaattacatttaaataatcacgtaatttagcaatcattttacgataacgagttagacctgctttaccttcaaaacctaaatagttagcaatacgagcaccttgattacgtttcttgctatttggagaacttacattagctaaccatttacctagtaatgacacaggcttaccttctgacatgtttttaatatcagatgttagttggttaccgatgatacgtgcaccttctgtatccacaaagtgaatactacgtttgtgtgcgtactccatagtttcaaataagtctgtccaacgaccaacatatgccatgtactccattaaagtaacgattacttgcttgttttggttacgaccatccactaagtatttgattgcttctaggtaagcggaacgttcacccaatccacctaaacggatattacgtaagtgtaccaaattgcgtaatgctaactctgggttttcatcgtaggctttagcaaacatgtttcgtacatctcctaaacgaccacgcatagcccctgcttgtgcaaagaagtctaagttagcgtttaaagttgatgtataagttttagctccattttctgtagaaccaacagttgtttcttcttttaggttgtctaaaaatgacatctgacatctctcctttgtatggtaatgttttatctaacaccactataacatgtaatattatgtaagtcaacactttttgtaaataaaaaactcatccgattaagaatgagtttgtatgtaatatcaagaaccacaggcttaattaaattcaatagttttaatttgttagttgattgctgtagggttctttatgctctggcaacctaagaggttagagctatggcaaaataccaaaacctttttaatatgtaacaagaatctattttatacgttgctctaccaactgagctacaggaggaatcatcctcccggcaggactcgaacctgcgacccacggctccataggcaataaaaattgctgttagattctttatgttccggcacccattaaggatggaactatagctatgctaaaaccgttttatttatgtaacaagaacgcattaactttaagctttaccaattaagctataccaccaatggtggcagttggattcgaaccaacaactcacatttttcagatgtattagttttaaaagtttgctgtggcgttctttatgttccggctacctgttaggttggaactatgacatatgtcaaaacctttttatcttgtctttataatagcataaactattcaaactgtcaactattaatttaaatatattgaaacttatttaaaagctccaatatatttaacagtacccttgcatttacgtgcaaaagcttctagctctttacgagcacctaaacggtctggttgagaagactgtactgtaacttcttttggtacagtaatttcacgagttttcttaactgtctttccgttttttaacttttgttcgtactcttctgtacgagtagaagttgttgaaataattccgtaaaatttagacatgttatgtgacctccggtcattttattttaatggggagtgatggagttgcaccacccgagctttcgcaactgatttacagtcagccccgctactacttacggtataactccccgcataagtatgtatatatcaatacaatgtacaagaacttttagtgaggtagctctcatagtgtattaatggggtacattgtgtaacttcaactagtattgcctcacacgtgactagtcttatatacacaatgcctacatacaacccgatagaccacccttggtacgcatattaagaggcgcagggtgatacgaatatatggattgcaggattcgaacccgcaccctttggttggaagccgaagatactacccttatactaaatccacataatgttaataggcgggtacccgacagcgaagtatcattcctgtcttgtcattctcctattaactccataataccttgcctagagttgagctaggactcacaattaccgaaggtactaatcgggaaagcaggactcgaacctacgaccccacgctcccaaaacgtgtgcgctaccaactgcgctatttcccgttaacttatacatatattataacacaaacttacatgatgtcaacaactatttgtaagtttttttaatttatccattcgggacagtgtgctttaaccattcagccacccgcaggggtaacccgcaggacgggattcgaacccgtataccactgtcctattggataggcttgtgtacctgtcatcttccgattacacacacctagtctagttaccgtaccaatagatttgacaggaatctagggtaacgcccaatatggtgttaattcacctcgtattctgttacaggtttgcaaccctgaacaaggatgaccaatcctaatggagcatagcggactcgaaccgctgaccccctgcgtgcaaagcaggtgctctcccaactgagctaatgccccgtataaaacatctccgctgagattcgaactcagaatgcgggattagaaatcctgtggtttatccaattagcctacggagatatgattgtttacagataaggtactcctgtaaacaattcaattgcttcaatttcagtatgaaagttttcccattctaaacattcatagaaatcttttaagatatgcttgtctttcctgtaaacagtctcacctttatgggctttctcacagatttctctaacagcatccacattatacttaccaccagttttatactgctctaaaccagaatctaataaaactcgttgtacttcttcacttttatctcctgctttccaagaatcaaaagctttttcaaacagtgtgtcctccatgttttcaccttctacttccatgattgattgaataaatcttttccacttagaaggctccttgtgtttacctttacgaaaactcatgattagcctccattatctttaatgaaccgaggaggagggactcgaacccccaaacgcttttacacgtctatgacttttcaagagtcaattttttccagttatgatactccccgaaaaagaaattgattgactagtactgttagttgactagccaaccggaactacttaaaccgaactctttaaacagctttagtagtttatatttcaaatggaaggcatgggattcgaacccacacatgctgttatacatctacttggtttccaaccaagcctctttaccgtttgagtaaccttccgtcttgggagcaggcgggtttgtgtcaagtacacaatacctaatcttttgtgcatgttgttccctaggcttcatgcacaccctactatctgcatactaacagacctgccaattttctaacactttttctaatgcttcgtatggacacattactgtcttaccgtgaacatcatgtattctcaaaataatataatgctcatttatctcggaggtaacaaagtatatcttgtccttcactaaacctaaacttccgtttaaaccaatgaattttaaatacatcatgttacctcctaactatgtataacccatgaagcatcatggggggactgtagtatgcccaacctgcggggatgctccgctctgaatccgtagaaatcagccacaattatgtcactggtaaggatttgcaccttacatgcacgcttccattagttagtcggcaccttcgagatagggacatacagcttcaattttctaatggatttataggaatctagccttacagttgtttacccgacttgttctagactagcctgaatcttcccctgtgctatactgtgttaattagcgtttacctattccgccacagtgactatggagctgacgggactcgaacccgtgtcctaacgtagaaccatacaaaattctacgggcgtagttactagttttaatctacgttaaggttacaactaataactgaaattaccttaactgagtggtaaagcctctcctgagttatccacttttacctcagcgttgtcggttgatgagtcctctaggtagaaccgaccctagtctagaggggtaagtgtgtagctagtctaaaactaggctacagctaataattcttcgtttttagcagttatatttactgcgatgattaagtcatcactctgcccgctattcatatactccttacgccagtcgaaaccaaaacagccccaacataagaatttcttttgactaaccctacccttccggcagggtctaatcaaaagtatacaattaaaaaaatgaaaatgagttacggaaaatgtaacgtctccaccaccggactataagggtaagttgttccggtctttaacctaagtactttacttaaatctaacaggacagtcttcattacgtaaactacttaaccatgtaaaacgtaaaggtcaatttccgttgacctaatacaagaggagggattcgaaccctcacgcccatcacaggcatggcattctaagtgccacatgtctaccaattccaacactctcgcataataacagtcctacccacctactgttctgctagcatatagcttgcaggctttttatctgtgttataaaaaccagaaaggttatacaggtaacaggagtcgaacctgcatgtcacaagggacaatggattttaagtccacagcgtataccaattccgccatacccgcataatcactttttatgaaacaaggagaagtgtaaccttgggttattacgacatttgcagaactcgtaaccaacgagcgcatctaccctcagaaaggattttgtccctgccgacttcactgctttgtcaatgttagcctgcttgctaagatagatgtcttccttacaagaattactatacagcatcttgtaaggaaagtcaacacttacatataaatttatttaaaaaagttttgatgaatctaattgagagaaactttcgggtagagaacctagttcttccatgtactcttggtcaatctcgtaaacagttaactccgttacttcattttcaatagtaagtttcattgcttctgctgtttgtatactgtgtccttctacttgaagcttatcatcaagataaatgccttcccagtctcctgcaactacataatctgctttcaagatattacctactttcttctcaatttctgataaaaattattatccttgtaatcatcctcgtgggcatagaattttttcatgtcatatgtccaacaagtttcttctactcgtttatgatgtgtcaatgttacttcatcatcaaaacgaccttgatttaatttatgcctgtaatttctgttaaccattctttttatatctcgaacagttgaatctttcatacaaacatatcggtaatagggttttctgtaacttctactcattgtaagtcctccttaatagatacttacaatttagacaatactttcttcacaggaaccactccttattaataaaagctacctcccgaaaaacgtttcttcaccaaagtgtaagacgtaaactaacgacaggtcatagttttccaattaaggcaaataccagtgagaggatttgaacctctgacacccgccttatcaagacgatgctctaaccaactgagctacactggtgtgacccatgtgtcaggactttcacctgttctcggggtgccccgcctctctactaatctccccattcggtgcccctactagagtgactagagatagttagcaataaaaattatatatcatgaatcaaatttttactgcatcctatatacacgataccgtctacaggatttgaacctgtgacatccaccttgtaagggtggcgttctcccactgaactaagacggtgaaatatggaaccctaccagaggatttctttcggtattacaatcacctcggcatgaacaaagccagatattgaggtctggacttctcacgccccgggagtcgaacccagtatagacaaaccatattttatacggaagacaggattcgaacctgcgatataggagttttagtgcactcattatctcccacggtatccgctacgtattgccatcacgtcacttccgtatgttaaccgacagtaaaggaatcgaacctctatcactagattcgtagtctagcatcctatccaattgaacgaactgtcgctctaagctagcaattacgcagactgactatgggcaccttcgtcccgtcccctgtaagtgccctcctacaggttgtccgtggcaccgcaatgtactaaccgatgtccccacagggatttgaaccccgaaccccccgattaaaagtcgggtgctctagccgattgagctatgaagacagttgtgtttttcaagataaccctctcgaaaaaccgttactaatagaaaaactaagggtctcgactgacagatttgaactgcctgctcctcctaagaggcgtgttaccaaagccatacaccaactcttcgagaatatcccctacaggattcgaacctgtgaccccctgattaagagtcaggtgctaccaccaactgagctaaggagataagattaccaatagctagttaagccttacggaatcgaaccgccatgaggttatgaagctcacatagaccactagacacaaaactagcttattgataaaattctatatagataattgtatgcaatgttcgcactaactaaccagataaccagtcaatcattcaaaacattaatttgtgagtttccgctcacaatgctgattgagagaatcgaactcccattcccgggttacaaagccggagtaatagccgttatactaaatcagcgtaacccctcaatagaggggaattattatactaagttaccatacccgtaggtatttgtttgagcttgtttaaacataatgctcttgatagttaagtcgttgtacttttcatcgtcttcatcatcaaggtacacatcaacgttaacgttcttaccggaaataccgattgtttcgtctttaccaactgttaagtctttactgttgaaggatacatcaaagtagatgctatcttcttttgtacgactaccgaacgaaactctgtcaccaaataaatccaagcttcgagagttgattacaacaggttgtaacccaccttcaaattgaatagttactgtataatattgattttcaatattaaggatatttaaatcagcaatagcttcaccaaatgggataccaaagcttaattccaatgcaattgctcgtaagcagtcatagtttaacttaattctacggctaaacttaacaacactgtcaatttcaccatagtaagcttcgtctaacttatcttgcaagtaagtacgaatttcatctgcatcaggatattcgaaacgtaaatggtaatggaaacgtcccggacggttaagcataaagtcatttacacgacttaagctattaacagtaagagcgtagatacgtttacgttgtgataaaccatcgaataagctcaatagtttttcttgtggttcacgaccgtcacggtcattgaatactttttcaaattcatcgaacaggataagagactcttggtcaatactgtcaataaattctgcaatccccggataagcttctgtaattaagataacaggcatatcctcttcaatagctcgttgagataagatttgagtaaatagtgatttaccaatacctttgtctccacttaaaatgattcctaagctacgattaattgttttaaatgtgtgtagcactttttcaattttagctaaacggtcaccgtaaactttaggttctttcaattcaaaatcgtctgttactactagtgagaacccagacattggattgaatcgaactttataagtttgcgcaggcaacttatcataagttttaaggtcgtttgcataaatttcatagttactaccatagttgattactttcataaatattccccttattcgtgttttattagcatttgctaatggagaggggtggaattgaaccaccgacccctagggtttcaatctagtgctctaacctactgagctacctctccgtgtcaatttggacttatcccccacgtggttactaagataagtcctatgcctttgaagtgtggatactcaaaaatgagtacaggtactaaaaatctgatgacaagtcagatttatgtcataagcagaaggtgagattcgaactcacgttcaggggtttgcaatccctagccttaacccacttggctactcccgcattggcatccctctaggtttttatctgcatcgggactcacataaactgataagtgaaaacagggcactagtctgttttacacctgcgctatcagaacctagactcggcaacactgccttagatgactttactcttgtaaacacgtcacattcttcaacaattaccagtagagtgctacataccagtaattcgttcctgtgaaggatagtacactataactatcaccgctgtccaagaatacacgccgtgaaggattcgaacccccgtcttccgggttggagccggaaatgatagccactacaccaacagcgcaagattcggaggggagggactagcaaccctccgaaaaatgtaagataatgagagattaaaacatgccactattaaaagtggaataggtaattaaggattcgaaccttacaagcccttactgcttaccttgtaaacttatagtatcatgcgttgtaccgaaagtcaacactttttataaaaataatagggagaaatatttctccctaaaaatggactataccggaattgaaccgatgacctgtcagttatgagctgacggctctgacctactgagctaatagtccgtgtaataataccacgaaataaaccttagtaagtcatatagtcccagaaagggagacatatgaaactagtgttgaatgccataatcgtttaataaatgtgactgagagagtaataaatttcttaggcatgtccatatgcctcctttccaataatgatagttttaagatataaacagaataaataaaagagaaaataataatgaataatagcgcatgagagagtcgaactctcgattccggttcgaaagaccggtgtcttgaccgcttgaccaatgcgccataaacgagctatatgggacttgaacccatgaccttctccgtgacagggagacgagcactcctgactgctccaatagcccaatgtttccccaaccaccgccacctaagggattcgtacgtctacgtgagttttttggttatacattattgttcaagacaataaattgtacgagtggaataccaatttaccactctgcggttcctattgcggtaggtgggagtcgaacccactaaagcttggttatgagccaagtgcctaaaccgttcggcatctccgcagtaatacaagtctggttaaaaactcaaaacttaatagattaagggcttttcttcctgcttcatatacactcactgcattcggtcacatactcagagaggctgaaccatcgggagctacccaatagcttctctctgcctttaatgtatggtctagcacggtggctaacaacgttcacctaaacattcagcattaaaagtattattttacatataacccatatgtcttctgtaatattttcatccaacgctgacttaagctacttgtaccaaggtctcttgttaaacctgtatttctacagttctcgtcaaagggagtcttttgagttttccaaggtctgccaagcttctcacacttccacctaacttggattcttttccacaggaacgtctattgtatcccccaagagtcttgtaccttacaatccatgtatactccacataacgcttaactgatattagcttttactaatagttactcctatgttaccataagacctacctgcaacccaaagcactatcgcaccttcggttacatccagactcacgccacgttatcctagcaagctgttcaaactttctgcactaggttcaaaatctattaagttttcaatttttaaccactaacttgtggtgtaatactaatatagcataacattacaaagttgtaaacacctttttgtaagtttttttgatttttttgatggaaggtaagggggtcgaacccttacaccggatttctccgacctaactgattagcaatcagccctcttaaccatttgagtaaccttccaaaagcaaaaagggaacccctgtaattaaacaggggtaagagagatgtctctaaaagcctacaaccattataacatagaaacatagtttgtacagccgtaactgtacaactgtcaggacagggttcgaacctgtatcgcaaccttcaaagggtcgtgtcctacctgttagacgacctgacaaaaaggtggaacctccctaaatttggggaagagggaggttctcatgctattaacaaacacgaatttgctaaccaagtaatcttgactagcaactcacctagcaggacttgaacctacaagaactggttaacagccagtcatgataccgtttcatcataggtgaattttagttctatcaacattataacacaaaagctgatagaactagcaactttttttacaaacttaacaacttttttcttaactactgattcagcaacttactcaatagttaaagacttaaagaaagaggaagtaattgaggtatgtcaatcactaactaaagtatacaacatttttatcatcctgacaacaactaaatgcaaaaaagttcaaaaaagattataaatagttaaattatcagaatattcaaattaatgtcctattttaaatttttgacctccttatatacttaatactatatattaaatctatatatctaaattatataattattagactatatattattaatatatataagacttgcaaaaaattaaaataggacatttttctgacaattcacttttagataaaaagaaagagagcaaaatgccctcttaccgtgtttcaaagtattccttgattgtatactctctagcttctttagcttcctcagtttcatctttaggagctaaatacaatttagtaattgtagcgggtacctctaccatcttatagtcaataaaagtagcttgacgtagatttaagtatcggatacctgttgttctatcagtacctgtatgaacaggcaagaaagttaattctttacctctgacagaaccattagcttgtgttagtgcatcaactacagttccgcccatatagcgtggaaataggtaaaccttgtcagtacctactgtaatttctgcgaccttttcgtgtgttggatagttcacttataatttctcctttcagaatatgctataattacagtataagtataacacattctatggtttaaaaatgctgaacacgtaagtcacaaccgcaccgagaacaatcatgaagatgttttccacgatgtctcttttatggtcaaactctttgtcgtttacaccttcgagagcatcaatggtttcttccagttttgtaatctggtacgtaagatgtgaatatttttcttcatgaacagctaaccttttatcaagactgttaacgatgtccttcaattcactaactgcattattcagttctgtgttgtcctgtttaatgcccttctcagttagttctccatgttggagcttgtcttccaatcgttgcagtcttaatactaggtcacctacttggtaatcgttcatttgtgctccccctctcggttgtatagctcaatctcccggtcagttagaaaaccacatgtaaccgcctatgcccagaatacatccgacaaggtaaataattggagtatacagcccaatgaagagcataaccacgctaccaacactaagtccgtataatatcaaaagatacttatacgatgccaaaggacttaaatctgcttgcagttttttgtactgtatagctcgggtgacatagtaggatgctgagtaaacgaacaactgtagcaataacatagcaataaatgctagtcggtacattctatcgcctctcttctttcctagagctatctttaatatagtacaccaaagcctttataatcaggtgtgctagattaaatatgtaggctaaaaaatataaacggaagagtgagaaaaagtgaaggtacggaaaaaattattatacaaatcaatttttatcaccatctctgttatcatcatgatttgtgcaagcaagctgattgcagatatgctaggcttagaacaacactttacaacaacaatgcttgtaggaggttctttgtgggcttggatagctagtattgtctttgattcttatgagaagaggaaaaagaaagataatctacagcaacagcttcatgaagcactgcgtgatttaaaagagataaaagcgttaatcaaaaaataattaataaggggtggaggatatgtcccttacaagagaagaaataaagcaaaaaaggcagtatatttttagcaaagctcaaaagacgacaaatatacgaaaaggggataaacgcatagcaagtgctacacggatgtgtgcagtatgtggaagaccgttgtccagacttgttcttactaatggttctgcaatagttactacagcacatgtaagctgtaagatgtcagatttagtacgattgaacatgtgcgaagacatacggtcttgctatgcgtatacaagtaaaaagggggaggaatagccacatgagtatggcagaccgtattaaagaaaatgctgaacaaaagaaaatggaacgtacatccgaacaacgattacgtgacacatttaataatgcttctctcacgttaattaaccagttcatggctaaagttatggcaggttcaatagatatagatgacgttggggatttaacccgtctattccaaatctacatgcaaattaataatatcaatgcaggaatgcaagagggaactggtcaattacctgctcttagtgctacgcaaaaagatattattgcagataaggtaagcactgaaaaggctaccatagacggagaggaggaggaagttgtttcgttggaagagttagctaaattatcagacgaagaaattgataagatgctattggataaggaaatccaaatgaacaaagaaaacgaagcaacgttttaatgacaaataaagcacaacatattgctaaaatggcaaaagaaatgtatggtacggacaaaataacaactgcacagcttgcctacatcacagacatgttaactccgtccacatatttactaagaaaccactccgttcgtaatcatccgattacatttatgatttccggacgtgaccaacaaaaagcccaagcacatagaccttggcaagtaaaaattattaatgaccaacatcgaacaaaggcagttattaaatcacggcaattagggctttcagaaatgggtgtaggaaccatgctacactttgcagatacacatagttacgatgcagttaagtgtttgtataccttcccaacaaacgaacaaatgactaaattcgtacaaacacgtcttgaccccgtattgcaacgtggttattacagtacgattattgacccagaagtagactcattaaaggctaagaagattcgtaatagctttttatacttccgttcaagctctaaaccgggagctgtagagggggtcgatattgattacctatctatggatgagtacgaccgtgttcctgcattagccgaagcttctgcattggaatctatgtcatcttctccatataagattgttactcgttggtctaccccatcagctcctgatgtaggtatccatgctttgtttgaacagtctgaccaatactggtacctacacaaatgtgataagtgtaatcattataaccaaatgaactatgaagactatgtaccagaggcaccagtggaacgtagagggaacatcctttgtgtaaatcctaaaggggtagacccaattgctaaaacagttgtggatggctccttccaattcgtttgtcaaaaatgtggagagccattagaccgttggtacaatggtatatgggttcctaaatatccagaccgtactaaaaatggtctaggtattcgaggatacatgatttctcaaatgaatgctgtttgggtatctgctgaccaattaaaaacaaaagagctaacatcactatcgaaacaagcgttctataactatacgttgggttacccttatgctgaccaaaaacttactgttaatgccggtgacgtagaacgtaacagacgtggagacctcccagaatctcctagagaccgtggagattacaagtttatctctgtaggtattgactggggaaacagacactgggtgtccattcatggcgttagaacgaatggtcaagtagatttaattaaattgttctctgtaggtaaagctaacccgttaaaccctgatgcaattgatacagatattcagtcaattcgattacaattagcaccatatgaacctgatattatcgttgctgatgttggtgactctggtgataaagttgctaaactgattcagatttatggtaaagaccgtgtatttggttgtgtatacccatctacacctaaatctacaggtaacttagtgcctagttggaatgttcaaggtaacaaggtatctgctgataagctaatgcagaataaacgatacatctcaaacatgaaagatggagttattggtttctaccacaaaatggatagtgaactaatgctttacattgaacactggggaaatgtagtaattcgtgatgaagaggatgaaaaatctcctacaggattccgacaaaccatcggacgtaaaggtgatgaccactattcacaagctagtgtttattccatgttaggttatgaacatttgatgaacgtatttacaggggcagatgactacgggtttaactctgattggatttctactcaattgaaccctacacctcctgatatttttactcagtttacttaaaaaagcaaaatgtcctattttaatttttctacgtccttatatattaatactatatatctatatacctatatctagttagtaagtatatatagtataatatattatataagggagacaaaaatttaaaataggacatttttattaaattagctattgattgacaaaaaataatatgctattatactacttgtcaataatagcactagttattttttcttgtcataacaataaaggagacgtttacatgaatgacaatcaagaataccaagctcttgttgataatcttcttagctctgttccagaatttaaacctgtagaagctacagtcagtaaatcctttttagaaggtatgctaggcaagaagttagactacgggtacgttatatcagaaaatgaaaaattatcaaaagactattcacatattgtgaaggcttatggttttaactccttttatgacctatactgctatgctgatagttgtgattcactaaatgactatttaattaaaggtggtcaaaaagatttatcaaagttgaagccagttaaaagacgagtaatgagaaatggtaaaatgatgacgactactatctacgaagacagttccggagaagatgatgataaaaacccattagataaggacactcaaacagaggaaaatgttgagccaagaaatgctagagatttaagcaaaacaattattggagatgaccataatggtatagacccaaaacaaattgctaaacttaaaactgaggcaggtaatctaaatgggacattttcaactgattgttcttcatacttagttcttcaaggagaaaccggagaaattggtggtgtggcaggttatcgtaaagagggtagctatttatatttagctttctaccaatcagacgaccttacaagtggagtggcttatgtagcatttacacaactattgttacgtgctcgtaaacttggcttgggcgctaagattgatgctactgatgacccgttagcactagaattatttaaagaatacggacttaaaaaaagtggtagttgttatataatttccaagagttccctactggaagcgcttggggagccatgatttcaacttttgagttatttttaattttagccttctcaacaaccgtgtttatatgctataatctttttgtagctcaaacagtcaagacaatttttgatttgagaaaaaaggcacaagttgtgctaactgaaagagcaactgagctaacgaagaagttaacaaacatactgaaaggggatgtacaggagttgccagagaaagaaaacgtaattattaacgaacaaacactctctgacttgttagtcgaaaaagcaagcgatgccgactacaaattgttcattgagaaactgacagagattgtaaaggatttatattcaaattatcaatttcttcgtcaagacccacaacccgatgatttcatgtcaggttattttttagggttccaagtttttagagaggaataccctgtcgaatatgagtatttattccgattagctattgaccgtgggttagacgatattaaaatcaataaactctttgtcgaagctttacaaaacggagaggtattaccattaggagatgccattgtagaccctaacttgtccggatgcagttctatccttcaagcacaagaagtacgtgtaaacattgtattcgcacctaaagcatacatggagcgtaaagaagagctgattgaagaaaaaactgctgaaatggaaaagcagaagaaagagcaacaagaactagcaatccaaaaagacaacgtggttaaatctgcacgtcttgctgaggctgtcattaacgaattagtggatgaagtcgcagaaaaacacgaactacaagaactcgttaaacaaattaaagaaagcatgaggtatttctaaatggcaaaccctacaaccaaagtaacattaaaccaagcattaatcaaagaattgcgtgcacttcaaggaaaaagagagtccttgattgcaagcaatctacatgtaccagaacctcagtcagttatgattccaattcctaatgttttagtaacagatggtgacaaagaggtactaaaatttattaaaaatatcggtttaattagagctgataaatcttttgggttagatgtggcaattgaagcaggagaaaaagtaacccttacagatggacgttcttccactatcttggaatgtattttctattacacaggagatacaaaaattgatgaaattgagcaattcttagaacaaaactaatatttcctgattaaaaagaagctttttttacttgtgctatattaacactgcacaggaaaagagagcttctttttttgtgacttttttacaggaggttgcaagatggcaggagaagtatttagtagtttgattacaagtgttaaccctaatttgatgaacgcaggtagtcgtaacggtattgctattgaccgaattattctacatcacaacgcaacaacaaataaagatgttgctatgaacacatggttattaggtggtagcgcaggtacatctgctcactatgaatgtacaccaacagagattattggatgtgtcggtgaacagtactcagcattccatgccggaggaactggtggcgcagatattcctaagatttctaaccctaaccaacgttcaatcggtattgaaaatgtaaattcaagcggtgctcctaactggtcaatagaccctcgtacagttacaaattgtgctagattagtggcagacatttgtaaacgttatgggattccatgtgaccgacaacatgtcttaggacataacgaagtgactgcaacagcatgtcccggaggaatgaacgtagacgaagtagtacgtcaagcaaaacagtttatggcaggtggaaacagcagtacagctacagccactcgtcaagcattcttcgatgttgtgaacgtaaactctggtgcatttaatgtgcaaggatggttcatccctagcaagtctacaaaaggacaatctatttggttgtactttatggacaagaaaacgaataaagaaattgctcgtttccaaggtaaacgtgtagttcgtgaagacgttaagaaagtatatccatctaaccctaacggagcagatgttggttttaacgttgatggtgcaactccacaaagtcttatgggcaaagactattacttcttgttacgttacaacaacgataacaaagaagaacttttcgtaacagataaagtctttaaagcacctgcactagttaaccgtggttgcctagacgtaattagaggtgacaaaggtcaggttactttacatggatggcatttatcttccaaacgtagaaactctgacaaacacttcttgttcatcatggataagaaaacgaataaagaaattgtgcgttttgacgttacaaaatcttcattcaaagcttccccagatattcaaaaattgtatgacggtacaattgcacaacgaactaattgtagatttgcttttgctcatgcactggatgctaaatcccctgcacgtggtaaagacatctatattttaagtcgttactgctctgaccctgcgggtaacaacgggatttccgaccagttacaacttggtggaactcacaaattgtaacattacattgacctaccttctggtgggtcttttttattactgtaatataatgtaaaggaactgtaatactataggactaactttgtaacactaatttgctatattagttcctgtaagcaacacataaaactaaaacaacccaaaggagaacgacaacttgaagaaaacgacaattgcaacattaggacttttaggactaggactatcattaggattgggagctaaagctcacgcagacgaaatccaagaaaatggacaaacttactggcaagtagaatccggagacacattatcagctattggtaatcgttacggaattgattttaacttaattcaccaagcaaactcagacaaagtttcagatgctaacttgatttatgttggggacaaactattattaccattaaacggtgaagttcaagctcctgtagctcaaccagtgcaagaatcaccagttgtagaacaagcgcctgtagtagaagaaacacctgtagttgaacaggcaccagttgttcaagaaccagtagaacaagctcctgccgttacatctaactcagcaaaagaatggattgcacaaaaagaatctagcggttcttactcagcaactaacggacgttacattggacgttaccaattagatgcttcatacttaaacggtgactattcaccagaaaaccaagaacgtgtagcagatgcttatgttgcaggacgttatggttcatgggaaaatgcacaagctttctggttagctaacggttggtactaaaataataaatactaacagattaaaaaaagactctctttttagggggtctttttcttatgctatattataactgtaacttaaaaacaaacaggaagtgatagctatgagtaacattaacatggaaaccgcaattgcgaacatgtacgctctaaaagcacgaggtattacttactcaatgaactactcccgaacaggtgcagatggcacaggggattgctctggtactgtctatgattctttacgtaaggcaggggctagtgatgcaggttgggtacttaacacagatagtatgcacagttggctagaaaaaaatggttttaaactgattgcacaaaatcaggaatggtcagctaaacgtggagacgttgttatctttggtaaaaaaggtgcaagtggtggttccgcaggtcacgtggttatcttcattagtagtacacagattattcactgtacatggaaatccgcaacggctaacggtgtttacgtagataacgaagcaactacttgtccatatagcatgggttggtatgtgtatcgtttaaatggtggaagtactcctccaaaaccaaacactaagaaagtaaaagtacttaaacacgctaccaactggtctccatcaagtaaaggtgcaaaaatggcaagttttgtcaaaggtggtacatttgaagttaaacaacaacgaccaatttcttattcttactccaatcaagaatacttgattgtaaataaaggaacagtacttggatgggttctttcccaagacattgaaggtggatatggttcagatagagttgggggaagcaaacctaaactacctgccggatttacgaaggaagaagctacgtttattaatggtaatgctcctattactactcgtaagaataaaccaagcttatcttccccaacagctacaccattgtatccgggacaatctgtaagataccttggttggaaatctgctgagggatacatctggatttatgcaacagatggacgttacatccctgtacgacctgtaggtaaggaagcatggggtacatttaagtaacatgacttaagagggctaaatagccctcttttttgtgctatattaaattagtagacagtgatgaaaaattgttacagggctacctgtggtatacttaaactagtacaaatgcttgggaggtaagaatacgtggcatacttacaggacgatacatggcaagcagtaaaacagttagctaaacaaaacggttttgtaggagactggattctaattattcacctctactatgaaaacggtggaaacaatgtacaagttcatactgctatagataataaaaattaccgcatactacgaatcttagataacaaacaggttttattagttgatagagaaggaaacgttgctgtagaggactatgaagtagtcaatgatagtcagaaaggtttcttttatagtgatatgcacaaagtcgaactaacacttccggaaggttgtagcttcaacggtaaacaaagaataaaaatttatatatgaggtaggtgtaatcaagttgccaaaatggttagataaagtgttgggtgtagaagaagatactgacatcgttaaaagcgaagaagtctaccaaaccttgcttaaagaaattcaagcacagccgttaacagaaacggtagagaaaggtatgaatggtaaaccagtagcatacatgcaacctataattggtgacatgtcagtaaaccccggatttaagacaaaaccttctattagaaattctcaggatttacacaaaatgttgaagaagtttggtaataatatcattcttaattcaattattaatacacggtcaaatcaggtatctatgtattgtaaacctgcaagaaactctgagacaggtgtaggttacgaggttcggctgaaagatattgaacaagagccatccacacatgacattgcaaatattaaaagaattgaaagctttttagaaaataccgcagtattcaaagaccaaaatagggataattttactgctttttgtaagaagatggtacgtgcaacttatatgtatgaccaagttaactttgagaaggtattcgataaagatggtaattttatcaaatttgataccgtagaccccacaacaatcttcttagctactaacggtaaaggaaagattattgaaaagggagaacgatttgtacaagtactagacaatcgaatcgtagctaagtttaacgaacgtgaaatggcttttgctgttcgtaacccacgtgctgatattgaagtaggtcagtacggttatccagaactagaaattgccttgaagcagtttattgcacatgaaaacaccgagacgtttaatgaccgattcttctctcacggaggaacaacacgtggtatcttacatgttaaagcaggacaacaacaaagtcagcaagcattagatattttccgtagagaatggagaagttccttatcaggtattaatggttcatggcaaattccagtagtatccgcagaagacgttaagttcgttaacatgacaccatctgctaatgatatgcagtttgaaaaatggttgaactatttaattaacgtaatttctgcgttgtatgggattgaccctgctgaaattaacttcccgaataatggaggagcaactggttctaaaggtggttctttaaacgagggtaactcaaaagagaaaatgcaagcttcccaaaacaaagggttacaaccattattacgctttattgaagatactgtaaatacttttattattgctgagtttggagacaagtatcaattccaatttagaggcggagacctaagtgctcaattagacaagattaagattcttgaagcagaagttaaagtgtttaaaacagttaatgaagcacgtgctgaaaaagggttggaaccaattaaaggtggagacgtaatcttagacggtgttctaattcaatccattggtcagttaatgcaacaagagcaatttaactatcaaaaacaacaggataagcttaacaggctcttagagctttctggtggcgaagcagatgattctaatggaattagcttccaagacaaacaacagggcttagatggcacctcagctagcgtaaatggcaaaggagagtcatctgttggtaaagatggacaaattaaaggtaagggcataactaacaccaattctgctaaacaaggtatgaaaggtgacaaacctaacgactggcaaaaataaatagaggggtaacaccctctatttacaattgtccaactgtttagtggtagttctgctatattaaaaacagatgtaagtttaggtggtgaatgaacaaagatgcaagagaagtataatattttcgttcccattgacgtagcaggttccgtagagaaatctgaacaggcaaacgatggtgaatggtacgtacagggttatgctacaacgcctgaccttgacttgcaaggagacattattttaccacagggaattgacatttcttactttgttactaaagggtgggtaaactacgaacataaacaagatgcagaatacattattggtgtaccaactgacaactgttatgtagaccttaataaaggtttgttcgtggaagctaaacttatgaaagaaagcaagtatgctcaatcaatgtggcagttagctaataccattcaaaaatcaggaatctcacgtcagttaggtttctcaattgaaggggcagttacaagtcgaaatgcaagagacaatcgtattattgagggtgtggctatcagaaacgtagcattaactacacatcctgctaacccacaagctacgtgggaaacacttgttaagtcttggacaacagggtatggaattactcctgagacacagacagatgcaggagcattacgtagagagatgtttaaagaagacatcacaaatctaacatatgcagtgaagacagtagctaagttgtatggtaaaaaacccgaagataaagagtttatattacgtgaagttgctaagagtttcgaccaagaaacctctgaaccagagttaagtgcatttatgttacaattaactagaggggtttccttacaggaagctaacaacttcattgaaagtagaaaggagctaaaatagtgtctaaaacaattaatgacattatcgaagatttcgattcaaaagtgaatgtacaggaagtatctaaatctattgaagatgaaaatgtagagcctgtacaggaagaacaaattgaaacaccagaagctgttgaagaaggtgtagaaaatgacaagccggaagaacagcctgttgaagctgaggaagttaaagaggatgttgaatcagaatccgaacctactgaatcagatgaaaaaccagaaacagaatccgaagtcgcagaagaagctactgaaccagaagtggaaaaagtagaaaaatctgataaagaatccgataaagaagatgaggaaaaaaaatcttctgatgacgaggacgacaaagaggataaaaaggataagaaagataaaaaagctgacaaagaagataaagatgaaaaagatgaagacaaagaagatgttaaaaaatctgatgagtccgaagacgtagaaaacgttgaaaaatctgttatttcttcccaagatattgtcggtggattcgaagctgtattcaaaaatatggcaaacctttttgaaactcaaaaatctttaactgatactattacagaattaaaatctgaaatcgtaagcttacgtgaatctcacacacaagctatcacaatgaatacagaagatgttaacaaatctattcttgtagataaagttgatggagtatcagtagaaggtaaagcagtaggatttgtttctaaatctgtagatgtagaagcagatgtgacttctgaacaagaagatgttgttgaagtagtagtagaaggtgccgaacaagaagaagctccggctaaatctgatgaagaacaattgtttgacagtgttcgtggaatccgtgatgacttaatgagcacatatactcgtgttgcaagtaacggacaagcccctcgtggtgagttagaagaaattcgtcaattatggggacgtattaaatcccaagacgaactagctcgtgcacaagcattcattgataaatacaaataaatttactaaaaggtaaatttttttaaggtgtactgctatattatagtcagaaccaatgagagacctgacatttcccccctgaacctccacagggtcaggtctcatctttgagaggaataaaaatgaaaggtgatttatatataatgccagaagacaaaaaacaagaagctaaattaaatcccgttcaggaacaagtaatcaaaggatttacaactggttatggtattactcctgacacgcaaactgatgcggcggctttaagacgagaatttctagatgaccaaattactatgcttacatgggcagaaggagatttgtcattctatcgtgacatcacaaaacgccctgctacatctacagtagctaaatatgacgtatacctagcacacggtaaagtaggacatacacgtttcgttcgtgaaatcggtgtagctccaatttctgacccaagcttacgtcaaaaaactgttaacatgaaatacgtttctgatactaagaacatgagtatcgcaactggtttagttaacaacattgaagacccaatgcaaatcttaacagacgatgctatctctgttgttgctaaaacaatcgaatgggcttctttctacggagatgctgacttatctgaaaacccagaacgtgactccggtctagaatttgacggtttagttaaattaattgacaaacataacgttattgatgctaaaggtgaaagcttaacagaagcattacttaaccaagcttccgtattaatcggtaaaggttatggtactccaactgatgcttacatgccaatcggtgtacaagctgacttcgtgaaccaacaacttgacaaacaagttcaagttatccgtgacaacggtcaaaatgtaacaatgggattcaacgttcaagggtttaactctgcacgtggtttcattaaattacatggttcaacagtaatggaattagaacaaatcttggatgaataccaaatggttagtcctaatgctccacaaaaagctactgttcaagcaactgtagaaactgacaagaaaggtacattccgtccagaagacattgctactcctgctgagtacaaagtagttgtagtatctgacgatgcagaatctgctccatctgacgtggctactgctacaattgctaacgctactgacggtgttaaactagcaatcactatcaacagcatgtaccaagctcgtcctcaatacgtagctatctaccgtaaaggacatcaaacaggattgttctaccaaatcgcacgtgtacctgcaagtaaagcagaaaacaacgtaatcactttctacgatttgaaccaacaaatccctgaaactgctgacgtattcgtaggtgaattgactccatctgtagttcacttgttcgaattactaccaatgatgcgtttaccattagctcaaatgaacgcttctgtaacattcgcagttctatggtatggtgctttagctcttcgtgcacctaagaaatgggcacgaatcaagaacgttaaatacattccatctggaaacgtaattaacgaacgctaatcttagtttaactaagaaaaattgaatagaaaacggaatagggaacggtctaactgttccctatttttattataacgaattaaatggaggaatacaaatgttaaaatctacagtattacaaaataaaaaagtggcaacatcttttggagaagctgaatttaaccatttaggagaaagtcataacttgccagaggaacatcaaaaagctttagctgaaaaggtgccttacttgacacacattcctgataagaaagaaaaacctaaagaggaaaaagaagtaaaagaagaaaaaccaaaagctaaaaaagcacctgctaaagctaaaacagccaaaaaagataaagagtaggagggcatcatatgtacccagattacggttatgatgatggtggaaaccaagatgtataccaaccatatgcacatggtaacccaaaacatattgacattgcagacctagataagattactcctgctgattacggttggactcccgacacgttaaaggcttacatgtttggggtagctgtagttaaccctgaaacaggtgaaccattaggagatacattttatgaacatgtaattgatacagcaattgctaaagctgaaaagaaactggatattgcgattttacctcgtttaattcaaggggaacatcacgatttccaccaatctgactttaactcttacttatacacgcatgtatttaaacgaccactaattcaagctgaaaagctacaattagaaattaacggacgaggaatctaccgttaccctgcaaactggtggaaagtatataccctagcggggcatatccaaatgtacccaacagcaatgatgcaaacaggtacacaatttgcctatgattttgcattctctggctacccacaattagcaggtatgccaccttcatctggtcaagtagatgctccacaaatgattcatattgactacgtagcgggtatgttacctcgtaagaatcgtggatacaacgctgagtgggagtgccctgctgatttagagcaattagtaatcaaatatgctattaaggaaatcttccaacaatggggacgtttgattattggtgccggtattgcaggaaaatccttgtcaattgacggtgtaactgaaagtatacaaacaacacaatctgctatgtatggtggtgcatctgccgacattaaacagattgacgaagatattgacagactagaacgtgacttagcttcctacttcggaatgaacctaggaattatttaaggagggatgactcatggctaatgaaccaacacgtttcagcagttcaggttctacaggtaaccctaagcaatacatgaatgtaagtagactagagtttgaaacaaaaggtatggatacctttgtaatgaaccgtggtataaacattctgtgggaacgagcttggctttgtacatgccgaaatccgatgactcttgctcctgactctaattgccctatttgtaggggtagaggtattgcatatcaacctgctgttaaggatataatgattatccaaagtcaagaaaaaggtgtatcaaatcaagatttagggttgttcgattctggtacagctattggtacaactccaattgactctaaaattactttccgagacagaattactgtcccagatgtggaaatataccaaagtttcatttttaatgtaaatagtcgtagattagagacaggtatgtttttaagctatgatgttaaacggttagaggatgtgtatggtgacaaagggcaagtccttgtggagggtaaagactttacgatggactatagcacgaatactttttatcctaaacaacatttgttaaacacgaacatctctatcaacatggcagtaacattacgttatctggttattgatttactcaaagaaagtcgttaccagtacacgaaatttggtgtaaaagaaccgctgtttgagaaccttcctagaaagctcctattgaagcgtgaggacatctttgttgatagtgagccttttgtattagaagtagatacgaagtctcgtctagaggcactagagaaggaaaaagaagtaacagaatctaagatggtcgaccctaaacgtacaggttcaagtgcgggaggattctttggaggtaaactaaatggctaagaaaggacaacgacctgcactgttcaccagtcctaaagaaatgttaggtaatctgacacgagcaatggtagatgagattctatctgatgcacaagaccaagcattacgtgcaggtgctgatgtccaaagaatgcctaattatttacaggtaacagaatcaagaatggctaagagcggtgtaattgatttaaaaccgttcttcgctcgttctagtaagaagaagtataataaaaaaggtgaatggtacttatatattcctattcaaattaagacaagaaagatgtctagaagattgtatgacgatttaaggtcttttcctacaaatggtcgtcctgtaacagttaagatggactatctttatgatagaagaaaacaaagtcccgctgtacaaagtatcaactatagccctaagtccaaaaatgttacaattataccaagagagtggggagaaggtacacggaatacatatgtgacattccgtacagtaaatgccaattctccggctaacagttggataatcaaccgtagtaaagtgaactcggacgatatgagtaaaacaatgttagctaatatcgacaggttaatgaagtggaaattgaagaatttaggagggtaaaagatgataccaagtttagacacttacttgtataaagaatttgaagaaagactgagaattatcttagaagagtgctatattatagacgaagctttgaaggagatagattcccaagctttagagacatttaaaaatacttattgttcaattgacggtaaggctccaaagaaagaaatcgaaatgtcgtattctttcccacaggagaagcagaactttaatgctcgttatgtgattacactaggtgggagtgatgaggagaataagtcaatgggtggtgtacagggaggctatacttaccgagaaggtgatatagttaatgaagctgttcaacttgtccgtaatggaaaagatttaattctgaacacaacaaagcctgtagctgattttttgaatagcccagatattagtttttcagaaagcgaccatttcagaatcgaaaacaacaagcctgtatttgattattccggtaatgaacacttagaaggtaaatcttttaatattgtttatactgtgaaagagtctgatgaggatgtagcaggtgtttacaaagggtaccaatcctccgataccgtaaacattgtcggaattagtacaaatatggacactgcccgctgtctagatgctatcgcaagattaattcttattacgatgcgtgacagcttagatgagaaaacaggatacatgctacagacgttacactttggagacatgcaacctgtaattgaatcaggtgagacagtagtatttggtagaccttgtacaatcgggtataaagtaactaattctattagttttgacttaaaccgacaaatacgagaaattattaccaaaaggaggatgaaagcctaatggcaaaagaaacaacaaagactaaacaagagagtccaaaggaacaacctaaaaaggttccaaagcctaaagggtacgttcatgtagatacatttttgggctatgcacaagtactttacggattaagtaagtatcaagtagcaggcttcaaagcattcatggcagggagagagtatcagcacgatgatgccgactttgttccgtttttggaaaagtatataggaaaggaagttaaataataaatggctgtagaacaattcccaagaaaaaaagtgtcccgtccacatactgaaattactgtagatacttctggtatcggtggtgcatctaacagttctgaaaaaacattaatgttagtaggttctgctaaaggtggtaaaccaaatacagtttatcgtttccgtaactaccaacaagctaaagctacattacgtagtggtgaactattggatgctattgaattagcatggaacgcttctgatgtgaacactgcatccgcaggtgacattttagcattgcgtgtagaaaatgctactaacgcaacaatcaaaaaaggtggtttaaccatcgcatctactatttatggtttagatgcaaacgaaatgcaagttgctttggaagacaatagtttaacaaatactaaacgtctgacaattgcatttgcaaaagacggatacaacaaagtattcgataacttaggtaaaatcttctctatcaagtataaaggagaacaagcacaagcttccttcactattacagaagatagtattactaagaaggcaaataaacttattctaagtgcaggtgctgaggttgaagaccaaactcctgtaatggaatatagcttaggacaaggtgtttactctgatacaaacgtattagtaagtgcaatcaacagtttacctgactgggaagctaaactattccctatcggagacaaaaacgtccctactgaaacatttgataaagtagaaaaagctgatgttaaaacaggtgagaaatatgttgaagctctaggcggagacattgctaaacaattggaatataacgactacgtaacagtagaaattgaccgtgcaactccaattcaagactttgcattaactaacctttctggtggtacagatggaacaatcccagaatcttgggctgacaaattccctctattagctaatgaaggtggttactacttagtaccattgacagacaaacaagctgttcattcagaagctttagcattcgttaaagaccgtacagacaatggagaccctatgcgtatcgttgttggtggtggaacgaatgaaacagttgaagaaagtatcgcacgtgctacaaacttacgtgacccacgagcttctgtagtaggattctctggtactcgtaagatggatgatggacgtttgcttaaattaccgggctacatgatggcttcacaaattgcaggtattgcaagtgggcttgaaatcggtgaagcaattacgttcaaacacttcaacgtaacaactgtagaccgtatctacgaaagtggtcaattagacatgcttaacgaaagtggtgttatcgctgttgagtatgtacgtaaccgtaccttaactgcattccgtatcgtgcaagacgttacaacttacaacgataaaacagacccagttaagaacgaaatgtctgtaggtgaagcaaacgacttcttagtatccgaattgaagattgaattagataacaacttcattggaactaaagttgtagatacaagcgcaagcttgattaaaaacttcatccaatcattcctagataagaaaaaacgtgctcgtgaaatccaagattacacaccagaagaagtacaagttgttcttgaaggggatgtagcatctatcagcatgactgtaatgccaatccgtagcttgaacaagattactgtacaactagtgtacaaacaacaaatcttgacagcataacaggtcgggggcttttagccccctataccttactaaaaataatctaaaataggagtgaaacatagatggctagcgttggaaatcaaacagtccacacaggtaacacagtttacttgatgattggtaacaaaattatcggacgtgcacaatctgcatctggtgaacgtcaatatggtacacaaggtgtatacgaaattggtagtatcatgccacaagaacacgtatacttgaaatatgaaggtacaatcaaccttgaacgtatgcgtatgaagaaagaagacttagcaagcttaggtattactgctctaggtgaagatattcttcaacgtgacattatcgacatcgtaatgatggataacttgactaaagaaatcgttgttgcttaccgtggatgctctgctgtatcttacagtgaatcattcacagctaacgaaatcactagtgagtccactcagttcacgtacctaacatcagctaaagttaagtaagtagtgtaaaatagaccctaaaaaatggggtctatttttttagttttggtattgacaaattatacatgtatctatataataggtattgtagttggtatacattttcgaacttaatctttcttatctttatcttacacatgacctagcaggagtgctaggtctatttttttttgctctcatagaggcaactaactagtgtgctataataagtatagaatgctatattaacttatgaaagacataggaggaataagtaatgactgaaaaagaaaacaaggttgatttccctcagcttaacatgactcgtgaacagcttatcgaaaagattaaccgtggggaaaatctaacagacgaagaaattaatttgttaaaatatcataatgcagaagcagagcataaagaacttaaccgaattattccgggagttaacaatgtattctcaaaacattatgatttaaaagagtttggtatggaatttgatattaaaattaaagcaccaaacgtggtacaacaaggtaaaattcaagcaatgcgtgaggcttacttagaaggtatgggtatggcagtaagtaactttattttccaatgctaccatacactagctactatccgtgtttgtggtgtagaagtacctaaagagctagaaaaagatgaagacatctataacatctacgtcttaaacattatcgggaaggattttgcggagtggttaaactcctttcgctactaatctcgaaagtttaggaggtataaaaaccctcgtcagaaatacatatagccgaaacatgtgggctattatgaaaaaatttaatgtattacctagtgaccctgcatggcaaaatctaactcatgagcaagtagaatggattttgtataacatggaaagagatgttgaagaagaacaacgcatagctaaaggtcttgctcttgaaggtgaatacgaagacttggatgcttcttggtatgatgtacctcatgaagagtttaaccctgtacgtgaaggtcatgatgaagctgagattgctcgtaagcttaatgaaatcactacagaagaggacatggctaaacttaaagctcgttgggaagctagtcaggaagtcgatgcaatccgtgccgaaggtggtacaacgattgaggaagacacaatcaatgaacttattgctaacaatgtacagaaagctattgaagaagctaaacgtattgagaaacatggtggtaataagtggggagacaaaaccccgattgaattagaggaggagcgtaagaatctagaatttaaatctcagcttaagcaagatgatattcaagatgcaattgctctgttcaatggagaaaaagatattgaaccaacatcagtagacgatgattttgtaatataggagggtagggttttaccctaccttttctttgtaaaggaagtgtggaaatggctaacaactatcggttttacgttgatgcaatgactggggatgccattgcaaaattagaagaagttaataagttgatggataaaattgactctaagagtgcaaaaggtacccagaagtttttccatacaactcaaagagaaatagacgaagcagtagccgatatgcaacgtttaattcgaatgaaaaaggaactagataaaaacttcgaaaaacaaagttctatggcagaagctacaggtagcatgacagattttaaacgtgcacgtgcaaacctagaacagttacaaagtgagttccaaaaaacacaaaacgagttccaaaagttagcaagcatgaaagctaacccgaactttacgaataaaacagctttgaaagaacaaagagcttaccgagaagaattgactgagcaggaaaaagctttacaggcaatcaagaaagctcaacaagaattaaatcgagtaaactctcgtgtaaatcatagagcacaccaagctacctctacaggtagaatgacctacaatcaatctgaaagcatgaagaaggatttaggtggtgttgggctatactcagatactcaacgagaaaataaagaacgacaagctcaactaagagaccaataccgtagaagacaagaggagctatcacaagtacgttctgatacaaacttagatagacaggttcgtaagaatagagaaacatctatcttagaagaaatcaaaggtatcgaacaagagattgaagctcgtaagaaattcaatcagaccttgaatgacactatcgagaacttaaagtcaaaaacggaacagttaaacaatagtaacgttaaagtagaggcggataggaactccactgcgggcgttatagcttctcgtgccccatctatagccattgcaggtttaggctctgctgtggcggcaataggtggcttatatgctaagggagctactgcgaatgcaggtatgcgtgattcaaccatctctttaggacaacgtacaggtaacggagacttccgtgctattcgtaaagaagcccaaatgatgggtattgaaaagcaacttgggtataaaggagctgatatgcttcaattccaagaagatgcgttaagtaatatcgggtttaccaataaagaagacctaacagctaatactagagctttagcggaaggttcacgtgcagttcctgttgattctgaaaccttaagcgggtttatgaacgaccaaatgcgtagaggcgctgtgagcggtaaagaccaaattaaagcgattcaggaaggtttcttaggagctatccaaaaatctggtatggtaggtcgtgaaaaagagcagttaaatgctttgaaaacattaagtgaccaatcatttagtggacgtaacggtagtaatgaggaacttaaacaacaaatggctatgcttacactgttgaacaaaactggttctcgtgccgtccaaggtgaacagggtgccgagttaatgactagtttatcagcgggtattcaaggtagtgtttggaacaacaaggcttctttactactaggtaagggtagtcaataccaaggtttaagtggtatgtatgacttagcaggtaaacaagaagagggagctacccctgaaaatctgcaaaagattattggtagtgtacaaaaagctgttcctaatgatgaaaaaggtcagaaatatgtccttaaaagtgctatgcacgaactatttggtacaaatgcaactaatgaccaagtagatggtatcatgaaggcttacggtaatggtaatctaaatgaagaaaatatcaataagattatgaatgaaagcgaatctactggtaaagataaatacaagaagaatgcagaagattatactaactcgaaagagggtatggctaatcgttccgaagcagtaactgagaaacaagcttccggtatcaacgactatggtgatgctctacgaggaattaattctaaattaggaggaatccctccggctatgtatgctttaggtgcaggtatgggtgccctagcaactgccttgattacttcgggaactatgggtggtctctctagctttgttaagaacttgacgagagggacattctctgccggagctacaactgctacaacagccggagcaactagtgcaggtggttcattctttaaaggtgtaggacaagcctttaaatcaggtaaggctactggtggatggtcagcaggtcttaagagtgcaggtactacagctaaagacttagcaggtgctaatattgccggagctgaaactattgcaggagctacgaaagcaggttctgtagcaagtaaatttggtaaagtagcaggtaaagtagcgttacctattgccttagtcggttcagcaattgatattgcaagctccgatgacaaggtaaaatctgttggtgagaatgccggaggactagcaggtggatttgccggagctaaattaggtgctttagcaggtacagctattttaccgggtgttggtactgttatcgggggtgcattaggtgctcttggaggtagcttaatcggtaataaagccggtggtggtttagtagacggtgttcgtaagttctttggtggagaggaagcctatgcagacgaagtagatacaggtacttccgcaggtgggcaagaaacgcttaaaggacaagagaacaagtctggtaaacaagaagaacgagacatgacgaataaacgtgtcctttctgaaaaaacacgtgctgagaataacgctgaggaagcaactaatttatctatctactcaaaattacttgatagagcacaacgaatcctaaatcaagctagaaatcaaaatggtatctttggtaactccaagggtgctaacagttctagtgatagtggcggtatcggtgacgaccctgcaagtaaggattttggcggagactgggaaaaagccattcgtcaagcttctaaacaacttggggtagacgttacagaccaagatgtagacacattgcttaaattgattcaagcagagtctagtggagatgaaaaagctgtccaacaaatcattgatgagaacaactttaacggttctggtggtgccaaagggcttctacaatacatccaatctacgttcgatgcttataaagtaaatggacacgatgacatcatgagtggttatgaccaattactagcgttctttaacaatagcaactggcaaaaagacttaaatgcttggaataatcgttaccaaaatggtagtacgggttggggtccaacgggtagtaagactcatgcgatgggtggacatatcacttctccggaacatgctttgcttggtgaggtgccgggacaagatgaatatgttattaacccacatcaacctacagctcctagattactggcagaagcttctcgtaaaactgcacagaaattccgtttgtttggtaatggttctggggacgaatggtcttcccgtataggtggaattaacttatccggtggaggtagttcagcacaagcaccaacattaaacaatacaaatgatgttaaagttagcgtaaccatacaaggtggcggaacttctgaaagtattgctaatgaaattggtaataaaacagcaagtaagattcttcaatcagccgatgatgcaatgagtttctttacaaaagaaatgaaacgagtttaagaaaactagggggactcgttccccctttatttattgaaggaggtaaactatggcggtagaattacgttatcctagatttaacctagcgttttatacagaaaaagacgaatatcatattacgtatgatgcacagacaggtgaatctaatacttctgtagtaaacaaagataatgattcggaagtttctaacaactttatgatagaatccgttatcagtttaacaacaaaaaattcaatggaagatgacagtgctgtcttttcttttgttctagccggagatgtatactgggatagaattttaaaagccaatgatgcagttgtattacggctttaccccgacataaccagtgacttacctgttaacccagttttattagttgggttaatctcagaagtacgacttgaaggagactatggggagaactctaagatgtatcgtattacaggtcaatcatttgctaaggctttaatgcaatttgacctaggtgttattcaagaagttagtgttgtactaactgatattggttggttacctgatgatgcccaagagggggttaagatgacaggtagaagtgccagtcagctagcagaaggaatgatgaaccgtttcttacagtatatgaaatttgactttaacggagagggcttagagcgctttttagaatgggaattagacagttggacagaagcagagcggttgatagataataccccgtatattaactatgagggttccctaaaacaattgttagacgacatcacagctaaaccatttaatgaactgttctttgatgctacaccgggaaacaaatgtcgaatgattatgcgtagaaccccgtttgataaagcagactgggagaatttaactacgtatactgtaacatctaaagaagttatttctgagtcagtagcaacaaatgatacagaagcctactctatctttaatatttctataaataacctttatggtacagactctatgatgctcggttctaaaccacaggtattccctgctttagttaataagtacggatacaaaaaactagaggttgataacaaatacttgcagggtgcaattgtagataacagtgataatgcagatagtgcggatacaaatactgacggtgatacagaaacgaacgaagataccactacagaaagacgtacaactagaaaaaaagatacgaatgaatctagtgcattcgacacgacttacggtacagtaatgaactatctacgtggttacccattagacatcttaagagtgaaacgtggtaatgttcgagctaaaatacttcaagtagacagacgtattacaggaacaatggcagataaaatcattgaccagtatattacaacacagagcttgacaaaagaacagttcacagatataactggtattaatgaaaaaaatgctagcaagggaaatggtaaggaaaaacctacgtataaaaaacttgtgaagttcttggaagattacaaggatgaagcagagaacaatgagactactacaatcaagaatgaacttatgaatgagttcaaattaacagataaccaagcaacatctattgctagtgagtttgtggctaataaaagcttgcgtaaaactcaatatgacgaaatcatgaaaaacaatcctagtgatagtacaacggtatctggttctgatacaaaatacgtaaaagaatttacgaaacgtttagctaactggtactgcgaaaatcctaacttctatagtggagatattgtagttaagggtagtccagaatatcgtttaggcggacgactattcgttatagacgaacagaacaacgaattgtgggaatactatattgaatctgtagagcatactttttcttacacgcaaggatatacgacaaccctaggggtaactcgtggtcttaaaaacggaggtaaagaccgattcacacacctttgggacaagtcagaagacttctcaggaggtatgttgggtgaaaagaccttagaggctttactagaagagcaagaaaagaaaaacaatgagaacaatagtagttctggttctagtggtggttcaagcggtgttaacccatctaatattccgggtggtacagtagcaatgaaagctgtaaactggggacgttctcactccaaaacagaatcttcctttaggtctgcgtatgactggggaggtgggcgtacaggtagagacccatttgaaagttcacctattgctacagactgttcgtcatttgtatggtggtgttttaaacatgcaggtgtagaattgaatggtggagcaactgggatgactacatggagtattattgcggatacgaaacttgaaacaatagctacccgtggtcaaaagaactctgctatctttgataagatgaaggcaggagacattatctggttccgtaactgtgaacatattggaatttactgtggtgaaggaaaaatggttgcatgtaatggttcaggtaatatgaatgaaagtcctacagcaggtattattgtgtcagatatgacaagtggatactggtgggatacattcgatggagatgtaaaaagatacaattaacctcgttaatagcgaggttttttgttgtaaaaaaacaaaactagtatgtgtgctataatattaagtagagacacatacaagagaaaggatggtatcaacttggcaggaggacgtagatttcaggcagggttaggttccgaacataaaagattatacaaagaaggacaacaaattaatactttgttgctagcccaagttatccaagttaattataaatataatacagttgatttactagcattacagcataaagaagttttccaaaactcctatgccaatgaaggtagattttctgctcgtttaccgatggaatttggtggacgaaaccttgcaggacaaccatatggtcaagtaaaccctattgccgttggtactgttgtcctagtaggttttattaactctgataaagacatgccgattgttattagtgtatacaataacaacgatgtaaataaacagttatcccgtacacgttttgctaatgcagaccctacagatatggctttagcaggacaaatgtatcaaaaattcagtttgtacccatctttaacttacgatagtattgatggggatggtaaccgagtagttacattctctggtaaatcatttattgcattcgatacaaaagatatgcaaaactctccaatgacagatgctagttatggttctcgttatgaagacctaggaacctcttactataatgatggagaactaattgagccgatgaaaggtcgagcacctaatgtattgttcaagcaccaagggattcttgacgatgataataaaccagatacacataatttcatgattcacattaacccagatggaacataccgtacatctatgatggatacggaacaagactggcggacaatgtttgagatgacaccggagggtaaaatccgtttacgtagacaaggggatactgtacgtctaaacgatggttttgaaattggtgaactaggtattaatgaagaaggtatcgtttatttacgtaatggggacatggacttagaagttcgtgaagatggtatctattcccaaggtaaactaattacagaaagtatcaatcttgatgatatttatgaaaagttagctaatgttacttttgaaattaataagacaaatgagtccttacaaattttaactgagaaatcagagctacaagatggtaagattgtaaatctagaaacagagattacaattgtagccggaaaagtagaatctaaagtaagtgcaacagaagtacaagacatgattgatagctctattgtagacatgacggatgctattaaaaaagcccaagaagatgcagatagagcaaatcaagttatttctgatatggctagtgataatcgcttggctcctagtgagaagctagacttactaaaagagtgggacatcatcaagaatgagtatccaacttatttagcacaagctgaactatacgaagtagatagtacaacttatactgctaagtataaagctttagaaacatttgttactcctttattggaagacatggaagctactagtgtagtagatggttctattatgcgtaaaacatttagtgcatattacacagaacgaatcaatttactaaatgcaatcactaaagggttaaaagatggtttagaagaggcaatgaagaaagcttctcaggcttctgtagatgctacacaagctttagctgattctgcacaggcacaaattgatgtaaacaatgcaaaacaattgattgcagatattgctagtgacggtaagctgactgcttctgaaaagtaccaattgaaaaaagaatgggatgttattgttaaggagtatcctacaacaattgcccaagcaacaaagtataaagtaaatactgataactatacagctaagtacaaggcgctagaaacatttgttactcctttgtttgcgaacatggatgaaacaagtgttgttaacggggagcaactacggacagtattctctgattactatgctgtgaagattaccttattgaaaagtattacagatattgctcgtgatgaactgactgattatggtaaccgtattactgtagcagaaacaaaaatcacacaaacatccgaagctattacgttaatggcttccagagtggaaactgttgaaaatgatgttaaaacaaacacagcacaattgaaagtgcaagcagacttaattagtcagaaagtaactgctagtgaagtaaaagatgctattgataatgcaattgataacatgtctattggtggttctaacttgtttgtaatcaaaacgcaaacagcaggactattgaatgaaaataatggtactgtaggaacagccgtagataaatctgtagtatctaactacattaaggtaacagctaaaatgccttatgtagcttctttatatggaaacacagggacaaacagtattatcattgcatggtatgacacaagcaaaacgtttatctctggtcaagctgtagctgattctggtgatttccataaaacttatgttgcaccagaaaacgcagtatatgctcgtttaagctataaaaaagctgacactgttaaaatgaaatttgaagtaggtacgaagccaactgattacagcccgtcatgggatgatattaaaggtgaccagactgctttagaggaatacattaaacaggtagaggaacaagctaaacaagcacaacaagaagcagaaaacgctaagaatgaagcagaaaatgcaaatagtgctattgctgatatgtctaatgacaatatgttaacagcaaatgagaaacaacaaattttactacaatgggaagaaattaaaacggaatatccaattaatttagaccaagcaactaaatttggtgtttctgctacgcagtatacaacagcgtacaatgctctaaaaacatatttagacccattattagcagatatgacaacaacttctgtaattgttggttctactatgcgcagtacatttaatacttactacgaccgtagaacaacattgcttaatcgtgtagctgaactagctaaacaagtagctgaccaagctaaggatacagcagacaaagtagacgatgacttaaacaacattggtgggtacaactacatcggattctcttccggagaccatatgtatcctcgtttaatgattaagaacattggttactactatgtaccttctatggggagtgcagaatttgtagatgacatggtatgtttaaagccaaaaacaacagaaaagaaagttcagtatgaaattggctcctcatcagctaacatatccggtgttggtttagcaaattatcggatgaaagaagttaaaacaggtcaatggttgactgcttctgcaaacttaaaagttgttggtactggtaaagcatatattactatctttactttagagaacggctcttggcaattttcactaagtgatatggttacagcaagtcaaggagtaactcgtgtagtagctcaaagaaaagtgacagaccaaacacaaggggtattcatacgcatcagtggagatattattgatgaagttcattttggtaatacacaacttgaagttggtattcgctctaccccttggaagaaatcagatattgacattcaagaagacatcaacaatgttgcggacgatattaaagattatattggtgctcgttctgataacttaatcacaaatggttttggtgaattagggaacaatacgaacattggtggtatctttgatggtgctgataggattgtaggtaaaggttccttccgtcaagaagaaggaaacaaatcactattattcagtgaacacattgttattgacaataagaaagtttataactttgattactacatgcacacattaaaaggtgttggtagaagttacgcaatgattgccccgtatgacgtagacgggaaacgtatcacatttccttctctcgggggacgaaactacaactctattacccctgttaaatttacaaaactagcaaaaccacttaaagtcggagatacagaggtttttgtagaagatgctagtctatggaacggacaggcaccgcaagactaccaacgtagtattatcatgtggggttataaaaactcgttcggctatacttatcccgatggaacgtatagtcagttaatgcagatgaagacatatgatattggtgcagttgacaccacagctaacaagattacgttaaacaagccatgggcagttgcaaacccaaatagttcagatgggattttcccagtagggcatacacttagcccaacttctgacggttccacatatctatatttgaatggtcacgtaaatatacaagtacctactacgtacaccaagtacagccatttgattagtggctcttctgagtttgctaatacaacgcttatcccagtagaaacaggttctatccaacttggattcttgttgaaccgtgatacaacaggtgaaaaatcttggctaaacggtttacgtctacgtgattatacagatacgtataagctaaacgatgacgttagagaaacacaagaaaatgtggataaagcccaagcagatgcagataaagctaaccagtcaattgctgatttatctaatgataatttagttactcctaacgagaaactagatttgaaaaaagagtgggaaatcattgttgctgaaaaacctaagaatgatgctcaggcagataaattcggaataagtaaagtagcttacggtactgcgtatactgctctagatacgtatttaaaacccatcttagcaagcacaacaacgaactctgcgattgttggacaaactatgcgggatacgtttaaggcgtattacacggctcgtacagacctgttaaacactattgcatctaaagctaaggaattggctgataatgcacaagataccgcagataatatagctgtcggtactcgtaaccttttaatcggaacacaggacttttccaaaggtaaatatccgggtaatgctaacgttaccattacagatgaaaagctgtttggaaatgcagtaatgaagaacgattacactacaggtaccggatattcagatatgtaccaaatgacgacctcaattattccaacaggaactcagtatacattatcgttttatgcaaaggcagacctagaaggaactaaaatgtcttgttacttctacaacccaaatactacgacaagtagtgtaaacagtcaaggtggcaaacttagttctagtgacggtcgtactgtatttgttttaagtacagaatggactaaatactgggtaacttggacacagacacaggcagacaagcctaagtcagtaattattggtcgtaagactggtggggaagaacctaactctgctttctatatgtcttctcctatgatggtagaggggaacaaaccacaaacgtggatgaaagccccagaagacattgaaacagctataaacggtaaagaaggtgcttgggtttactctccaacagcaccaacaaatccggctgttggtttagtctgggtagactcttctaaaactccgaaccaaccaaaacgttgggttggtggagaaactggatgggttgccttaaccccagaagaagtaaaagatttaccttggggtgaagatggttctagtcttgctgactgggtagcacaagcagagcaaaagatttcttctgatgcaatcattagtactgtactaggttctgaggactttaccggtatttttgactccaaagcaaatacagaagacttaaataaccttgcttcttacgatgacttagatgctatgcaagctgagtatgaacgtctgttaaaagaagggattgcaggaattgacttctcaccatatgtaactaacacagagctagaacaattgaaagatagcttcactttctctgttcaacaagccggtggggttaatatgttgaaaaactctctaggattctctgggacagacttctggcaagcctcttctggtatagatactactcagaatgaacagttgtctaaattaggatttggttccggatttatgataaaccgagttcaaaatgcaacactagctcagacaatcgaattaccagaagcaaaacaaggtttgcagtatgctttatccttctacatgaatgtagctacttttggagatgtcactgatttccaatgtggggcacatatctacgaagaaggtgtgttgaagtatactgttggggtaacagatgctacacaagaaatcccaagtgactatcacttgtataaacttgtatttgaaccagagtctccgaatactgtcattgaattatttgttacaaatggtgcacaggcaactgtaatcatttcaggggttatgtacaatattggtaacattgcgttgaaatggcaaccatacccaagtgaaatctataacacgaacgttaagattgatattaatggtattactgttaaaaacaatcagacagatggttatacaatgattactccgcaagagttttcaggttacgcaagggttaacggagagatggaacgtatctttaccctaaatggtcaggtaacagaggttaagatgttacaagcagagaagcgtattacaatggaacctatttccgtgtttgcgatgaactctaaagaaaccaatacaattggttgggcgtttgttgcttccggagaggttgcacattctgccatagcatctcgtacacaatagaaagagggagccttatctgtaaggctctcttttgttgtgttgtgctataattatattatgagaaacaaaacaagaggtgagaaaataaatggctttaagcggtagtacatacacagcttttgcacggcataggcttgtgttagaatggagagcctcccagaatgttgcgggcaactactctgatgtaagtatttggttatacttgcagtctatggattcctatggtgctttatatgctcctgctgttggacaagcacaggtaacagctaatggggttaagcaaaccgaaaatgcaacatcacaattgaatgcttatcagaaaaaactattgctagccaaagtttggcgtgtaaaccataacgcagatggtagcaagtctttttctatatctgctagttatttcgtaaacgtaacctattcaggtgtttactacggaacaatctcgataccgtcattctcggtttcattaaataagattccacgtaaaagttcgttaaaccctgtgccagatttaaatattcctaataaactaggggtaagtattacccgacaaagttctagttttacacataatttaactgtttgggtagccaatagaacaaaccctacattagataatgactcccattgggtgtatttaaacagtattgagaacgtaggtacaagtggtacattcacatttagtgtagcaaacttcacagaaatgttcaagaggatgggtacaagtaccgaatgggtaggtaaggtgaagctctggacgaatgggttaagcgagtcagtgccgagccaacaacaaaccttccgaataaaacctccaatgaacgcacaggcttctgggggtaagttaaaaataaaagcaggagaaaagattactgttagtctaagtaacttccaatctgacggtaactttaaatatacaggtgtttttaactatcgaggggtatctataccagtagcaacaaatgtacatgcaaactctatgacacttacattaacccaagcaaacgtggattctatcttgaaagagtctccagatgatgcaggaacatgggggcaagtacgagtaacaagttactacaatggtgtacaatatcgaactccttggactggacagcatattgattgtaccattcctaaagaagattatctacctgtaatcaacggaacaccgacttatactgacttaagtgccgaagctactaacgttaccggaagtaaccaagtagcattacaaagtaagtctaatatccgtgtgactattccggctaactttgccacaggtcaaggattctcaacaattaaaaccgtgcaagcttcattaggtggggctacaaaaactgctaactataatgcttctggttttaacattgatattggtgctccaaatgaaggtactgcttcttcattagttgttactgttctagacggtcgaggatttagtacatcttggacaaaaacagttcaagtatatccatatagcaatccagatgttaactatacgattgcccgtagaaacaactttgaagtagatacagaattagctgtttcaagtagttgggcgcctgttactatcggtggtgtaaacaaaaatgcaattacgtcagtaacctacgcaactaaacgttcaggtacaagtacatggggagaagaaacaccagtaactttctccacagatggggctaaagttattgtcccaacaaccgttgttcagttacctaatgagtacagttggaatttcagactaactatcaaagataagtttggtagcttctctaaagaagcaaatatttctgccggaaaacctattatgtttattgatgctgttcgtgaatctgtaggttttggtaacctgacaggtacaggagaaaatagaaaccttaatggtgtaattgaaattgaggcggaacgctaccatactacaggtaaaactggtatccaaatgaataacagtgatatttctggtttgaatggaatatatttctcaaatgacgtaatggataacgatggtgaaggattgcattttatcaagtcagggaaagacgttaactcttccaataaaaaagactacgattatatgtatatgagagacggcggattctatgttaaccatgatggtactccaatctttaaagttactgataacggtcgtatgtattatcctgcctctcatttgtggtctggtggttggtatatgtctggtacacaaaatataaccccatcgaaaccaatgtcagagtgtagaaatggatgggtactcatgtgggctaagtatcaaaatagcacacagacatggaatgatgttgtacaggtatatttaggtaaggacttagtaacaacatatagtggactaggtgtaagattactatttggtggttatggtaacgttgttatccataaatatttaacgattactgatacagaggttagaggtaatgcttcaaacaccaatgctagtttaaacgctgacagagctattttagttcgtgttcacgaatggtaaacgaggtggaaacgatgaaaatatacgtagcagttgacgaatataacgtattgactggatggagtagtagttacgaagaaaatctaattgagacagagattgacgaaaatcacccacttattgtctctaatgatttttttggtaattataaactcatagacggtaaattagttaaagatacatctattgaattgttaaatttaaaagacatgttaaaggtagaattagaccaacaatgctcagaagctattattagcggttttagctacccattaacggatacagaaacacttcacgtctcttattcacgaaataaacaacaatactttgaagagattaagtctcttttcgaacgtaaaattgttactcgtattaactgggagtttactactgatgatggagctactattactaaagagctaaatgaaatagaatttttaaccttgtacacttttgctagtttggttaaaacagcaaaaatgactaagcttaaagaaaaactatatccactagttgataaacaaacaaataaagaagacctgttgagtattacatgggattctattcctgatgaaccattaccagaaaaacctgttattgatttaaatggtgatggtgaaataagtcaagaagagttcgatgctttggttaaggaaaacaaagaactaaagcaaaaagtagagtttaacgaattggctttaatggatgcaattaacatgctatcgagcatgattacaggttaattttaaggaggtgataacatgtatccacacttagcaatgctctatgcaacgtatgtcatgaaagaccctaaaacatggacgatggacaaagttcctgctatgattcgagaagatgtacaaagaattgtagatgaaatgacaaaaaaagaacaagcacccgagtagtctttctaacactaggggtttccattggtttagtcgcaggactagctattgggttcttcctataatgctcggggagaggaagagggtggcttaggctgtcctcttttttcttagttaattgtactatattaatggacgaaaggacgtgataagtgtgggacaatcagatggaatgggtggaacattaaaaagaattgctattcaagttggagacgacccaaacacaggttggtatagatttcaagttaacccaactcaatataaatacagcaaaccacaccgtgtaacaatctttaaaacaaagtctaacattatcactgaggactttggtaaagatattgagaccattcaattctccggtacaactggatttagaaaagactctagaggaatgaacggtgctgatagattaagagaactatctaatttgatagatgattatgcaaatcaaggcggtaatggtaaccgaccgaaagtagaaatgaagttctataattttactgatgaccaatattttgtggttcatttagccccagaaggtctcactatagaacgttctgcggaacagccattactatttacttatacattaagcttagttgtattaagaaaagcgggagagcctgctgaacgtgaccaagtaaacccagaaattgggaacaaaaatccaagtgtaggagacaaggataaagaaacaagaagtggcataattcaaactcctgcacaaatactacatgaacagtataaaaattctgtgttgccaaatatagcagtaaaccctagtggtacatcaggtgcctataactacggtttagttgaactaaaaagattaattggttacggaggtggtcagtaatggcaactgtatatcaatctgcggacttgcttagattctttcgttacttaaatgtaaacgtgcaaggagatgtcgttagtaatgtcatagacgaccaacctaactttatttctagattttacacaccgcacacaagagtgaataaaatatctagtaccttattggatattgtgaaagacaataacattagtgaaacaaacaaagagttatccaaggattcactaacctataagttcttgaagagtggactacgattaacagctcccgacatttaccagttagctcaaatcgtagtacttgagtcttttgctttgatttatgcaattgaagaaaaacctgaaatgttcaaaatgattaatgaatcagatgtgaaacaaacacgggagaacgtaaaatatcttgtggactacttaggggagaaaaaagattatactgatattgtaatggatttacattctatggatattgcccttggttacatccaagaacagattccattaattcaaggagggttaccagtaaatggcacgatataaaaaacatacaatcgtttatggagaaaccatgcaatctattgctcaaatggaaacaggttcagtaaacgactggataaaaattgctgagtataactccttggtttatccatacatagtagatactatgcaggagaaaatggctaacattgaacatttagcaacaccgggggatactttggtaattcctgtcgaagctaacctactagacatggacgtaagtaatctaaatcaaagagacatggattttctattaagtttatctctaggtcgtgatttagacatgacaagtgagacacaatactatgaaaatcatggtacaagtgatgaagtgttctcattaacccataacgggcacggagaccttaagacggctagtggagcagataatataaggcaagcaactatctctcgtctaatgaccgctaaggggtctttaatgctacatccagaatatggtagcaacctacacctactttttggtaaaacaactattgaacaaatgaaattgattagcttagaagtatgtgaaactgtattaaaagacactcgggtagctgagtgtgtattggttagtcattatatcgaagaagaccattatgtaggaaactaccgagcaaccatacaatcaacaaaagaccagttcgagtttgtagtacaaaatgatagtgtgggcgcaattgttatagaatagaaaggagtatccctgtgagactaaagaagatttcagaaattttaggtaggctaattgacgtaaccatgattaatactcatgagttaaacgacttctctgtagggtctacaatccgttccatttacgaagctgtatcaatggaacttgaacaatactacatcttaggaagagaaaatattttatggggtatcgaacagggggtactcaatgcttttgattttagaaaacgtgaagctaaacgggcttatggtatggttaccctagaatttcataccgtaacgcaaacccctgtttatgtgccgacaggtacgacctttgactctagcttgtctggtgcacctagtaacttgacatttcaaaccatgcaagactatgtgattcctgccggagttgttactgctaaagtagaggtttactgtacaacagttggttcccaaggtaacattgccaaaggaagaataaatcgggttattaacaacatctctaacctgaaaaaagtgtataatgaatatgacatacttacaggtactgacgaagaaagtatcgaatctgtaaagaaacgtttccatgctttcgtagaatctcgtggtcgagctacaatcaaagcattagattatggtacacgacaagtcgaagaagtatctggtgtgtatatcaaagaggaagttggttatgtacgtatttatgctcatgacttaaacggagatttgaaagacgaaacattagctaagattaaaacagctattgaagattatcgtcctgcgggaattaaattagacgtgttccctgtagtcaaattaacagtaccgattgacgtaacaatcacaattagtaataaaaacagaattaacactgcattagaagaacgaatcgaattaactattagaaactacttaaacagtcgtacagtatcagaaacattggtaaaagctgatttacttcaagctatcatgaatattgatgacaacttaatctatgactgtgaaattaataatctgagtggtaacttggatattagagacgaggagattattcgtgcaggagacgtaacgatagaattaatctaggaggtaacattgtgagtaattttttcagaaatatacacccactcttgcgaagaagtaaacgtccggagaagtatgacgatacgaacttcgctgtgttgaatgcgttaaattacgaattaacacaggcagagcaagaaaccattgctagtaaaatacaatcctccttagagtctgctacagatacgtacctagacacttggggagattggttcggggtgtaccgtaaggacggttgggacgatgaatattatcgtgcacgtatcatacgggaactacttcttaagcgtggtacaattcctgctatcattgatgcgttattggatttccttaacgacaatgatgcagtcatccaaatctacgaaccttggagaaacattttctatacaaataaatcaaaattaaacggtgacgaccatttaatgggttactactatcgttttgcaattattgatatttcaattgatagaccgtttcctcctgaaattgtagagattattaaggctttcaaacctgcgggagttttattctatctaagattagacacaagtttaaataagaataaaacaactgtagaaagtccatatgtatatctagacgtgacgaataagacagaattagagttccttaatggtttatattatgacctacgaggtaatattaacctgtctgaccaacgtacacaagttgtagagaacaatatcttccatacgaataactctatgctaaacggggaagatgtgcttgcaggagcatttgaccacggaagaggttacattcacttagcaagtacaacattgcttgattacacaccaaaacctactgactctatgagtgacttaaaaacagctctaggagaatcaggtgctgacatgtataatcaaacaaaagaaaaggatggaagaacagcttctattcaagtacctgcaacaaggaatgtccacaccctatactcaaatagtatagattttggtgactatgattatagcggaaaccctaatgtagctgtaaccgatgcagatacgttcaaattaggaacaggtggaactcttacctataataatggggagtatactgttttgatggatggaacagctagattaagtaggtataatacagatggtaaaaacagtgtatatttagaagataaggtaacctatacaatttcttgtgaaatgtatgttggttctgattataccggaaatgttgaccagatatttgctaactatgcgtatcttgatggtgggtatactgtactgcaaacatcaaggctatctgcaaatgctcctagagatacttggataacagtaagaggaacatctactatgaattatcaagggagagtacctaaagtattatactttacttggcaaacaattgctagtgatgttaaccctactggtacacttaaaatgcgaaatatgaaaattgagcgtggagaaattaatactccttaccaacctaatttattagtagagccattccaattatctaatgttcctttaaatgataatttaggagacccaaacgtatctttcccaattaacacacaaaattcctacttagtgtatgatggcaccataaaagaaaattggcaagctaacacggtgtataccttaacattaaagggtaagaaattaaatacacagagttggaaaccgtatattgatactaaaaatacttccacgcttagtaaaccccttttaactcctgtggaggggttaccgaatgtttggcgcagtacatttatggtctcccaaaatgatatagacaccggacgggttcaaaaacagttaagtatctaccaagcacctagtgcaacaaggggtacagcttcaattgaatgggtgaaacttgaaaagggtgctattgctacaccacctatcgaacagtatgcctacacaggtactcttgtttcaggtacatcttctaaaaaccctaaagattatacatggggaagtttatctcctgttttaggtaagaaagcatatatggtgtttgatattaagacatttatcgaagaaaattatgctatagaatttgaaaaacttattactgacctaggagaagaccaagcattaaatactgtgtttgaaaactttaatatctccacagcgcttaaggctttagtaagtccaagttcaccaattaatttttcggttgaactatacgatttttctacgagtgcatggcacaaattaaacacggatagcttagacctacgtatgcgcacgtttaacttagtagcaaatcgtattacagactatctaaatgactacaagctattatttgttcgttacgtgtttgataacgaaacagataaagatgtaacagttgaactagacatgttaaatgtattgttcaactatcgtttaggtgacggatatagtttagggctacaaagtactgtagaatgtttaagtgaaattccgttaactggtattaccctttctagtgatagtgttgaagttgctattggtgagacagcaaaagttactccaactttagtacctgctagcgcaactaatacagacttagagtggaaaatagcagacaccaaaattgctactgtagatgcttctggtaatattgcaggggtagctattggtgaaaccacattaaccgtgtacggtgaagatagaatcgttagtgctacttgcagtgtgtctgtaaaagctaagcacaccctatactcaaatagtatagattttggtgactatgattatagcggaaaccctaacattgcattaccaataactgacggaaatgtaaaaagaatgaacccaaatactacaaaagtaacattacatggcacctatgctacagtagaacaacttgcaactggcggtttaagtgttggtttcggtttaaatagtaatagtacaggggattttagtaaattaacagtaggtaaggcttacactatatcaattcctgtaagaatcaatactgattttgagggagatgtaactaagcttataaccagattaagatgtttaaaacccgataatagtactgtattactattccaaacaactgtacctaaagaagcaccaataggtgatttcttcgatgttgtaactacgtttactgttccgcaaacgacaagtgatagttggtcatggtacgttcatattgcatcaacaacagatttacaattcacaggttcatttgatgttggttataacattaagttagaagagggttcgactgctacgccatatcaaccaaatctattggaagctccttattatttaggtaatactcccctaggagagaatatttctgactctaaggttgcttatccgattactactagtgaatatttggtatatggtaaacttaacaaagaaccttacatcgctaaccaaacctacacattaacaatgaaagcaacaaaaagtaatgtaagtcaagtattttctgtatttattgataatggaataacaaaggtaggtaatctttcacctgtagaaggtttaactgatgtatggaaacttacctttacagttactcagacagcaattaataatggagtatcaaatatactcaaaatataccaagtacctagctctaacatcggaactgtaactattgattggttaaaactagaaaaaggtgatactagaacacctaacattagttcctacgcttatcatggaacagtgttaactacatcgaaagaagcacctacagaccctaatgtgtatacttggacaggtacctcgttaaggttaacagaataatatgctataatataaatagggcacagcatcgtgccctattttttaattgaatgctatattatctaatgaaaccatagaagaaaagaggttataaagtggctattgcaactaataattcccgagtgtatgcttcattacaacttaaaaataaaaaagacagcatgtacttagttatcggtaaaacctcaccttggacaaatgaagatgccccacctgctacagaccctaatacttcaacattacaagaagttgttggttacaaaaaagtaagtaaagcatctctatgtcgtgaatacgttgcagatgacgagaacaagtacccagtgattagctacggtactcgtaaatttactttaataccagatgaggatgcttataaagaaaaagcatggatggtatatatcgaatctgaaatcgtaggtgatgaattacctttaggtacatttagacaagtaggacttcacactgacctagtaccaaaaacaggtgtggacaaagatgcgttactacctacagaagtaacaaacgcaggtatcctacaattctttgaaaatagacaacaacaaaacagaactgccgatgtaacattgagagaaaaatttatcgttacaatggaaaacggcaaaacattaaaagcgtaagaaaggacgataagcattggcaaaagaaattacaaatgatgatttaaagaaagcgccctaccttgaccgctttgaccctaataagaatagaacacgagtgctattcaaaccggacaaacctctccaacaagcagaacttaatgaactacaagcgatgcaagattatgcgttatccaatgtagcagagtccgtgttcagtgacggggacattcaaacaggtatggaatttattcttcaaggcacaacgcttactgttaaaaaaggtaaagtgttccttggtggtaaaatgcgtaactttaatgaacaaagtattgaaatcacaggtacaggtactgagtacattggtgttaaacttgttcaaaaagtaattaccgcagaagacgacccaaccttgttagaccaaacaagtggcgttcctagtcatttctcagaaggtgcagaccgtttagaagaaacagttgtactaggagtaaacgatgatgaagcttcaaatatctatcgttttgaaaatggtcagttatacattaacccagatacaccagaaatggataaaatcaataaagtactagcagaacgtactttcgatgaatctggttcttatcgtgtacgtggatttgacatgtatacggaagcacatccaacagaccctaataacaaaattcaactagttattgactctggacgtgcatatgtattaggttttaaagtagacaaacctacaactactcgtattgatattgataagtctcgtgacttagaaacaatcaataacgaaggtttctactacagtaacgaaactcgtttgaataaattaggtaactcacctgtatctagcgtagaccgtgtaacagcccaagtggaagttgcaaaagaacaagtgtctcgtggagttgttggtggaggtactgattaccttaaaaatacttcggtaacaaaagttgttcgtgtatggacagaaggttccggagcatacgaatacaaacagggagaagacttccagttagttaatggtcaagctatctcatgggcacctacagggcaagaaccgcctgccggaggtacttactttgtacaatacgtttacaacaaaacaatgattgaaaacactgattataaggtaactgttaaaggtgaaggagataaccgtgagtggtatatcgactttaacgaaatgacaggttctaaaccagtagacgaatcattagttaacgtagattacaaatacttcttagctcgtaaagacttaattgtgttagaccataacggaaactttactgttcataaaggacaacctaacgcaatgcgtttagtagattcccctaaccatattgacccattggtactgaacattggtacagttcttgtttacccagattcaagtacagcagaagctaatcaatggacaatcactcggttaacgatggaagagctacaaaagttatctgtacgtgtagataacatggagtataaccaagcagtgttctacctagaccaacctgcgatggcaggagaaaacccaatctatttacgtggggtattctcagatgcgtttatctctcttgataaatacgatacaagtcatccagatgctacaattgcctttgactttgatacagcagaaatcacactgccttatgcagagattaataaaactgtaccatccattatcgaaggttctagtgaagcacatgtatggggacggttagtaactgcaccatttaccgaagaagtcggaattagacaaccatttgctacagaagcaatgaatgttaacccatacaatacattcaacaaacaaggtgttctaacactaaaccctagtgcagataactggattgaagaagaacgtatcactatcaccaaagaggaaacatctacaatgactattcgtcaatggtggagacacggtggagcttcttggacaaatgacgaaatgaaccttgtgtctaacgtagacttagataacggtatgagttggaacgacttaaaagacgactaccgtaactctggtttatctggtacaactttgtctagtggtggacaacaaacaaaagagtctatgattgagttcatgagacaaattgatgttgaaatctacgctgaaaacttagagccaaatgcaaacaacttagttgtatcatttgatggcttacgtgttcctgttacaccatcctctggttaccgtaaaggttcacaagagggtactggtatggcaaatgctgacggtacgttcaaaggtgtattcaagattcctgcgggtgtacgctgtggtactcgtgaagtatctatccgaaacgatacgaacttagcaagtacaacgtttactgcacaaggaacaatgaaaactactgaggacatcatcatccgtacccacgtaacaatcaacctagttgacccattagcacaatcattcagcttcaatacaaaccgtattgctacaagcttcgatgtgttcttcgcttctaaggatagcagtacaaacattatctgtcaagtacgtggtatctcagaaggcggtcaaccaaacaaaacggtttatgcagaacgtgtattaaaaccttctgaaatcaaagtgtctgacgatgctagtgtagcaactaagattacatttgatgacccattgatgtgtaaagcaggtcaagaatactgtttagtattcattactgactctgataaatacacaatgtggattgctacaatgggacaaaacagaattgatgacccaacgcaaagtgtgaactctaacccttacttagaaggtgtgctttacagttcatctaatgcgagtgcatggtctattcaccaaatgtctgacttgaaatttactgtgtacacagctaagttcaatgaagaagctgtcctagagtttgacgtaatgaaaaacattaacgtagaccgtgtggttctcatgtccacatatttaactcctgcgaatacaggatgtaaatgggacatgaagattgttcttgacaatgagcctgccggaactactgttaacgacaaaccgtgggttccaattgcgaactacgtagacttagatgttaaccagattgctcgtgaggttaaacttcgtgcaacatttaaagcaaatcaatatatctctccaatgcttgcattagatgatattatgtttgccggattcttaactgctctgaaaggtagttatgttgctcgtacaattgacttaacagaagcaccgtataacactattaaaatgtcttatgaacagtttactcctgccggaactactgttgttgcaaaatacagtactgacgaaggtaaaacatggaagacatttacaacacaacctacaacaacacaacgcacacaggatttcgttcgtgtggactatgttgaaaaggttaatacgggtggaacatttaaatccattaagttccgtcttgatatgtcaactcagaactcattcctccgcccgagggtgagacgcttaatgacgaatatgaccgacaaatagaagatgtaactgtaatgtaacatttctatgcctcttactgtggtatacttattgtatacgaaatagtaggaggttttttaatggttaaagcattacaattagcaggtactacatttggtaaatggtacgtaaaagaacgagatacttctaaaaaaggtagagcatactggatttgtgaatgctcttgtggaagaacagttcaatctattccgagcggtactcttactacaggctcatctgtgatgtgtaaacaatgtgcaaatgagaaatctttagtgggtaagacttttggtaggttgaccgtcattaaggattcaggtgaacgagcaactaatggtagtatcctttgggagtgtaaatgttcctgtgggaagacaagccttgtcaggggttcagagttgacagggggtcgcacaaagagttgtggttgttactccacggatgtactcaaaaaagtagccactaagcatggattgtctaaagtgaatggaaaacccacaaaattattccgggcatgggcttcgatgaaacaacggtgttacaacaagaaccatgcgagttataaagattacggtggaagaggtataaccatatgttctgaatggcgtgaagactttgaagcttttcataattgggctatgactaacggattttccgatgacttgtctattgatagaattgacaatgacaaaggctattcaccagataactgtcgatgggtagatgctaaaacccagattcgaaatagacgaaatacagttacttatgagtggcaaggaaaagagtatactcgagctgagttaagtaggttgacaggtataaatgagcaaaccattgcttcaagattgaacaaaggtttttcccttgaagaagccctttcttcaaaaataggcacttctgtattacttatgacctataaaggggagactaaacctgtcaaacaatggtgtaaagaactaggattgaactatgcaactgtacgtaacagacattataagggttggactgatgaagaagctttgactggtatacgtaataaatagtcaaccaagttgaatagcctctatatgctatactaggcatataggggttattttttatgtaaaggagacttattgatatgccagaatcatttagacaaaaatcatcaggagctttaatttttagacctacagtttctgagaaaatccattctaaccagatgaaagctcttgctaaagataaagagaaattgaacagagacatacaagaggttaataatttaaaacaagaattgactaaggaattagaagaaattagacaattaaaaaacaagttaaaaggataaaatgtcctattttaaattttttacctccttatatatttaatattatatatttaactatttatctaagttataagtatttatatattatatatttatatataagggaaccaaaaatggaaaataggacattgacatacacttacagtactggtacaatagtattgtaaggtgtgagacattattaggaggacttatgagactagtaatagatgtaatgcacactcagattagatttgatgaaaacgaaggtagtcttcgtagcactatacatagagtaatgcacgaagaacttggagtaaaagcagacggctatcaatttagtcctgcatataaatcaggttactgggatggtattattgatttttataataaagacaacgatacatttcctacaggtctagtacctaaagtagaggaaatcctaggaagactacaaactgctatgggtagtagaggttacatgtttcaatttgagattattgatgacagacctgacaaattcatggaagttgaagaaatggactcagaaattaaattgaatggtgacaatggagaaataattactctacgtgactatcaatatgattctgtaaaaagtattattgagaagcaaacaggtattatcaatgttgctactaatggtggtaaaacagagattgcttctggtttaatacagcaaatcctacctgctttagaatcgggagaaaggattgcattctttacaaacagctcctccatcttcactcaatctatcgaccgtattgaaaaacgattaggcattaaagtaggtgcctttggagcaggtaaaaaggacattcaacaagttacatttgtgatgattccaacaattacctctgctatttcagcagacccagaagctaaacttaaacttacaccgaaagagcgtatgtacaaaaagttagctaaagagattgctcctaagttccttacagggtttaatcaaaaaggactgcttgaaggttacatccgtaacttccaagtgaaaacaaaagctgatttacagttgaaacatgaattggaagaggcttactacagttgtggaaccaacaaacaggtagtgatgaaaatgcgtagttatcaagctgagtatgaaaaggtagtcgagaaaaagaacgggaaggtcttgaagaaatacaacgaagcaaaagagtttttagaatctgttgctgttatgattgtagatgaggcacaccatactagttctgatacttggtaccaagcactaactgcttgttctaatgctcagtatcgtatggctttaacaggttctattgacatgaaaaaccatgtgttatggcaaagaatgcaagccatttttggttccattactaccaaggtttcgaatgacaccttaatcagtttaggtcactctgcaaaacccaaaattaccattttcccaattattgcccctacagacattgaaaactccaattacatggatgcttacaagatggggatagtggacaatgtatacagaaattctttgattgctaaacttacaaagaaaatgtatgagagtggcagtggtgtactggtaattattaatcgtattgaacacggggaaacgattagtgagttattagatgcagaaggtgtgccacattacttcattcacggggagcttgataatgacttacgtgatgaaaagttacaagaaatgcgtgacggacatttgaaggtgatgatttcctcaacaattattgatgagggggttgacatctccggtattgataccttaatattaggtgcaggtggtaagtccttacgtcaaaccttgcaacgggtaggtcgtggcttacgtaagaaaaagacaggtgaaaacaaggtatctgtttttgatttttacgacttgacaaataaacacttgaagaaacattcggaagagagaagaaaaatctatgagaaagaacaatttgagattgttgacatccctcttccaacgaaataaacgaggaggtacaagatgacaagtcaatgcttaacaaatgaaattcgagcacaatatagtctaggcaacggaattgttgagttcgttgaaagattagctaaaaaagcacagcaatggggagaaacatttgctacccctatacgtaaaacaactgtagctgaggagatgggacgtgacacacgtactgttactcggtatctaggacaacttgaagagttgggtcttgttagtacagaagcaaaacgtggtagaaatggaggaactgttgtcgtgtttaatactgatattttaaattttgaaccaactgataacccgattacttcggagacaaaggaagctaaggagattcgtgaacgtgtcttcccaaaagcaccaactccgaaacctaaaagacggtaccgtacaaaattagagattgcagaagctcgcattttagaacaaaagcaaaaaagctttgaagaacgcttaaacgacttacttgaacgtaccttcttggatagagacttttttgataatttcgaagaacctcgtttgtatttccaagggtatttaattgcacaaatgtacaatgcttatgcagttattttcccaaagaatagacacgagttctttaaagatattgatgtgaaaaaatcagaggaaggtttacgtagtatgaacaaagctaaatcatacaacgtgttacctgctcgttttgtaggaaccccacagtacaacaaatttgttgaagtagctagatactgtaatgagaataatattaacccattatcttatctaactgttcaatttgagcgtgcagagcatttagccgacattggtaaagctcgtgtaggggctattccttatgtaaacactttactgtgtgaagaagctcgtaaagcttattctgacaatgtaatgttttatcgtaaaatgcgtaatagctttaacttattcggtatgagtagtagttctgttccgtataaaggggctaaatatgagattattgtagctctacgtactgcgtacgaattagatagaacaacaagagatacgttcaactacttattagatgaattagctagtggtgcacaacaatcagtgaaacaagcaaccttgttaggttattacaacactactttaaatgctttatcagaaagtgagttagtagacgaagaccaacaattaatcagagatttcttaaaagagcaagtattgttatattcacgtaagaactcattgagcagtactatctatgctttagctttcccattacaaattaacgctgttaattcagttgcgaccctaaaaggtcttgacaaagagatgtattacacttatattggtaacatgtacaaggttacagatgttaacgatgatgaatacaacagtttcacggaacgtggtcgaacaattgatttctcttacaatgctaacgatactttctttagcacaatgcgattaattgcagattgtaagggtctaggagttccggcaggtaagctaggaagtgccttacaaaaattcggtgaagaaaaagttccgttagatacttttggtatgttagatattgaacgtatctatgataagttgattgattcagatgagttagccaaagaccgatatattcaagacaaagatgcaaccatgatgagtatggttgtgactgacgaggggtagggagaaaagcagaatgagtcaaattcacaaacaaaccatttataaagccattagtgaacctttgttcgcaaaggatgtttttagtcgattaccaattgaagattttaaagaggatggatacgatatgattgtatccaccttaaatctttattatcgtacacacgatgctccgctagaggaacaaacgttgttaactcttgtggaagacaaaatgttgaaacaaaacaaaagtttagaagcacagcaagttgcttttaacttagtaagtgacctttacaaattagaggaagcagaaacagattcagaagcaattagtgaaagtgttcagaactatgtacgtaagactttaacacgtgaagctatcatggaagctgtaacgaatgatggagcattaggttctgaccaaaacattcagagccttatggagtctttgcgtggaatcatgacaatcgacacaggcgggcatggagcagaacttttagatttctttgctgatattgataagaaaaaagaacatctacgtaatttacaacaaaacaaatatccaacaggtttcatggctattgatgctatctctgatggtggtttagcccgtggtgaggttggtatggttattgcacctacaggtggtggtaaaactacttgggcagtaaaccaagctagaaattatgttgtacgaggtttaaatgtattgtacattcctctggaagaaaaaattgaccgtatgattgttcgttttgagcaacttttatctcaacaaagcaagaacagtatcctagttgatggggagttaaacgaacagttatatgaccaaattcaacaagcttacggtgcaggtaaagaacaattaaactgggggaacttatggattcgtaaatacaaaccccaagagctaactcctagtgggctatctcaattgatttctgacgtaatgattcgtaaagggcaacaaattgacgtagttattattgactaccctgatttgatgaagaatccccattcaagtggtggtaatggagagtcagatgcgggcggtaaattatatgaagatattcgttccattgcccaagaatatgattttgtttgttggactctatctcagttgaaccgtgctagttatggtcaagaagtgaagaatgccggagcaattgagggttcaaaacgtaaaatgaatgcggtagaattaatcttcacacttaaccaaacaccagaagagttccaaagtgggtttattcgtgcttacgtagacaagttacgtaataacagtggtgtagcttatgataaaatgttgtactttaaagttattccggaaacaatgacaattcgtgatgagacccaagaagaacgaatggctcatgcgaacttgttagaacaaacaatggaagtagctagggataactacaagaaggaaaacaattttacaccaaaggatgcccaaagtaaaattaacagtttaaacgcacagctagcgggaggtctaaaataatgaaacacattattaacttttctgattttcatatgcacttttttaaggacttctctaagccagatgctatttatgggactgaccgagcaaaagaacaaataaaggttcttgaagaattaatgaattacgctcgtgaggttaaaggagacgttttatttaatggagacctgtttcataaacgggtttctattgatgtcagaatattcaatatgatgttcgaggtatttagttcatatccagatgtaccaatcattatggttagtggtaaccacgataaggtaacgaacgctctagcctctgacagcgctctagaagcgtttaatgctttacctaatgtaactgtcatctctacaatggaaaagcttgtacgggacgaatacacgctctatggagttagttacggtgaagaagtagacgaaatgaaggaatggattgcagaggaagctaaaaagctagaccctaacacaatcaatattctttgtgctcatatcggtgttgacggttcttctactggacagtattcccatacacttagtggagcattcaaagtagctgacttgtaccctgataattttgatattgttacgcttggtcactatcataaacgacaattcttaggtgggctatctaatgtattttatgtaggtaacaccttacagacttcttttgctgatgaaggtcaagctaaaggcttcatggacattaccttagatggtaaagaatggagtatggaatttattaaagcaaactataccccatttatgactgtaacagcagatacagtgccagaagacttaagtggagcatttattcagtttgtaggtaatgttactgaaaccgaagctgttaaaaagcttaaagaagacaatgacctgtctaacttacgaattaaagtgcagaaggactattatgtacctccacgtattgagattaccgcaggttctaccccagaagaagttgtacgagcattcactgataagaagtatcctgacttacaggacaaagctttagaatgtttacgtatagctacagagatataaattaatagattttttaagcccagaatgttctgggcttttttggcatacacccttgacatgtaagtgcttgtaatgtatacttatgttagtaacagacatatacttacaggaggtaaaaatgttaaagtttaaacgtgtaagcgcaaagaactatctctctattggagaagtatctatcgacttagataatcgaggacttgttttaatcgagggaattaatgacacgaacgaaacgtttcagagtaatggttcaggtaaaagtacgttgctttcaactgtcacttatgcactatatggcactacacctagtggtttaaaagcggatgctgtaattaacagacaggtaaaaaagaacatgtctgttattttagagtttgaaaaagacggcattccatacagaattgaacgttatcgtaaacatagtaaatttaaaaatacaacgaagttatttcagggagatactgatttaacacaaaaatctgtagctgatacagacaaaaaaatcttagacattttcgggattgactaccttacatatgcaaatagcatcatgtatggacaaggaaacgtagaaatatttgctactgccacagataaaggtaagaagcagatattagaaaatctggctgatattggtgtataccgatatgcacaggatgtagcaaaagaaaaagaaaaagaagctaatgccttagtagaagaacttggtagacaacatatgaccaaggtagctgaaatcgaaacattaaaacaggtttattctagtgcattagagcaatatgctaatacagaaagaatgattgttgctcggaaacaagagtatgaagaagccagagtaaaatacaccgaggcagaagacatgctcactcaaatggaacaagaagtaacaccaaagattgaacaactaactaaagagttggaagcttgtgcagttccagaagatagctttgcaatatcagaggaattgcgagaacagcaggctaacctgtttaagttaaatcaagcaaaaactactacacaacaagctattaataaagcacaagtagatttgagtaacactgagcaagctacaaattgtcagttatgtggtgcacctttagatgcggaacatcggcaaaaagagatgttacgattgcaacaagaaattcaggagaaacaagctttcattacacaattggattcagcaattgttgcttactctgatttggaacagaaagctaaagaaaaacaggcaagggtacagcaagaagttaacgaagttgttacaaaacaacgcaatatacagtcagctattaatgaactaaacaatcgtttacgtacggctgaaaatgctgtagcacttacacggaacaatgtaactaatctatcaggagccttagctcacttagagggcattccgaaaccagaatatgacacggaagcggaagctcgtattaaagcagaaatggaagacattactaaacgaaaagaattagcagagcaagaagcaagacaataccatattttagcactagaagtcttctcaaataaagggattcgttcggaggtattagacctagtaacaccattcttaaatgaacgagctaatcactatttgtctactttatccggttctgatattgaaattagatttagtacacagacagaaaatgcagacggaagtctaaaagataaatttgatttagaggtaattaacggttctggtggagacacctaccaagcaaactctgagggtgagaaaaagagaattgacctagctatttcttttgccatccaagacttggtacaatcaaaagcaaacattgctgtgaacctaggcttatacgatgaatgttttgatggcttagattctatcggttgtgaaaatgtgattaagattttgaaagaaagacagaaaaacattagcagtatctttgttattacacataatgacaatctcaaaccattgttcgaaaatgtagttactatgcaaaaaacagaaggaaactccttcttagttgaaaagaagtaaggatggtaattacatgaaattatattcagtagataaagggcgtaaccttggaacggtactcgtcccaacaaatgtaggctacacacaacgtttagacttcccgcttgacacattgtttgattggtacccatgttgcccaagatatgattacaagtacagtgatacacgagataagatgtacattgtaatgattgaggaaaatgaaaagcttccgttacgttacaatgttccgtctacaaaaaaacgtgttaagtcaaaaacagcttgctttattacagatacttggtataatcaagaagtagctaatgacaacaagaagttatttagctttgctgaaaactatgacattgtaactcctaacaaagagaattatactctggaagacataaacaagagtattgaacgtgtacaggacattttagacatgctgtatacagttcaagaaaaacaagtagaaaaagacttgattgttcgagttggcactttggaaaaagaagctcctgattcagaagaattgaaggcagtgcatcaggaaattaaagaatacatgcagttagaccgagagggaaaagcttcacatgtattaagcttattgccccaacatgccgaagagttatatgcaaactttggagaagtttacacaatgttaaatctaatgaagaaagtagtgtaggaaatgttctcagaccttctaacaaatgaactaggcataccaaaagacattgaacacgaattgcgatataactgtccgttctgtgaaccaaaccatgactataaactatatgtcaaggttagtgatgatagtacgaatggattgtggatttgttttaagtgtggtcgtaaaggtaaccctatatcgtttgtaatggaatactttggtgtctcttttgaagaagcattagagattctagagggttatggttacagattccagaataagaactacattccaaaagatgattcattaacggatgaagagtacttattgttactacttgatactgtagggaaacctaagacggtagaggaggaagaagaaaaactcacgccccctcctttaccacaaggattccaactattatctcaaaatctatacaatccggaagcatacccatttttagtttattgtcataaacgaggttttactttaaatgacattatccgacacaatattgggtatgtactagacagcacagtcaatcttccatcaggaagacagattaggttgaagaaccatttagtatttcttacacatggtgacgatggacagtatcagtattggaatacacgtgcgattgctgatagttatataaagtcctttaatgcacctagtaaggacggagagtactccaagaagaatactatattcaatcttaacattgcatgtaaaactccacaagtagtcattactgagggagttcctgatgcactaactttaggagaatctggtgtaggtacatttggtaaacaggttacagatgcgcagattaatttaatacttaagagtgttgctcctgagcaaccaatttatgtgtatctagataaggatgcaaagaatgagataaaaaaacttgcagagcgtttgtatgaacgacataaagaaacttatattgttataagccctacagacaaagacccaaacagtattggtaaagagagtgcttgggaaattattaagaaccattctgtaaaggcagacggtgtaggtataatcaaattgatgttataggaggtacgtatgagtaacattaagtatgaagtacattgggtgcatcaccaattaggggtagataaaacacatggtgtatttggaacactagataaagctattgagtccatctatgattggtggacacagaatgactacaatccaccatatgttcgtatgtggacagtagatggtgtaactacattggactatgggtttcaccacatgttttataaaatcaaagaaataaaggagactaatgaattgaatccagtagttaggtttactaagagtgagggagccattgccccaaaacgaggacgagaagctgatgtagcacacgacttgtttacagacaaggatgctgtaattttaccgggaagactgggagcaacagtagttactacaggaattagaacagcttttgaccctaatttgtatggtctgtttatcaacccacgtggtggcatgatgaaatacccattaactctaggcaatacacaaggtgttgttgaaggagaatatcgtggggatgttgggcttcctcttaagaatactttctctttacaattcggagaatatactaacgctactcgtgttttagttattaccgaagacggtaagcttgtaggaaaaccagttaaagaagtacgtgaaagctatccagaatttgataagctttatgaagaacagctaactaaattaggtaatgagctagatttaatctatgacaatatatttactggtgtttctgaaacctatgttgttgcaggaactatctttattccaaaaggtactcgtttatgtcaagcattcttgcttccacgttacgctactaattttgttgaagtagacgaattagacgaaacagaacgtggtgaaggtgcatatggttcgtctggtgttaaataatggctagtcgtataccggatttaaagatgccacttctttatcttgtaggaagtgcttctattggtactcgtgagcatggctgtgatgtaacagttaccttacgagacttttatgtagacacccctgatgacaagttagagcaactaataactttgacgtacaaagaagacaaaattgaaaattttacacgacttagtgcagataaatgttcatttcgtgttatactaggagagtagacaatgaaagaatcaccaagtgtaaaacttacagaaactcatacagttactcttgtaaacactgacgtacttaaagtaggacaggttattggctttagagttaacagtcctaagcaagtaggcgcagaagtagtagatgcttattccgaagctgtcggtgttattgaacgtatctggtcagaacgaattgaggtcttaaacctgattacaggtggtcgtacagacctatgggcaaatacgttcgattggagagaaattgaaatactgtcagatgcggaacatctgttggaggcatataagaatggaatttgctgagtatttcaataaaatgcaagagcactatgcaaaaggtgaaactgttgaggtagaaaagcttgttaaaagcgatggttcaaaactagttacctatgctgagtttgaggatgctttagctactgtagcacaggttaccacacttgctattgaagaagcattccaagcacaggaagctaagtttggtcttgtgctaaaaacattaagagaacaaaaagttatctcagaagatactgaaaaagctattcttgctgagtttaataatataaatgaacttatggaggacgacattaatgagtaaaaaagcaaaacgtgtaggatttatttctgaggaagatatgagaacatggacagagtatttagctacaggacatgttcatgataaaaaccatgcaaaacagttagaacgtttaagtaaacgtgatattagcttaggggacgtagctactgtcgtagatttcatgtcaagacgtaatgatggttacatcactgctctaatcgaacaaaactctgttaatgaaaaattacttaataaattgggtgtaacagatgaaatgcgtagtgaagcgaaagccgaatacgaagttgaattgaaacaagcacaggaagaaattaaaaagttacaagaagagctagctgaaaaactacaaaagggtgagtaatatgagcacacatgaggaattacagaaactcggtctagttgacgaacaaggtagcttaaagatagaagctagagaaacaatggaaacacctctacaagctttagccgatttattaaacgataaggtatccagtgattctggggtatacgtaagcgactgctttcaaagtgttatgattcgggaggaaagaccttatcgagtagttaaggggttccgtgatattcctacgttggtattttcaggaacagtttacccattagacagattaacctgttatccagatattcataatattaactatcaggatgtaagtttatttaaacctgttaaagaggaacatgcagaccaaataattttcatggtgcaaaacctttataatttgaacaatagaaacaacaatttgtatatgcagtttaagagataccaatgtggaaaagttacctatgaagaaataatgaacacacttaagtctaacatggagttctggtctgtacctaattatgtagaatcattagttgaagagtattatgtgaacccacatctattcgatgttaaaacacctgtagaacaactaattgaacaagtagaacttattgagtctagacgtaaacgtgttaaagaaagggatgacgagagtacccatgactgattatagtgcagtaggaagaaagtcaaaatctaaaggtgctcggtttgaactagaaacagctaaaaatttatctaagtggtggggacatgattttcaccgtgttcccgcttctggtggcttacattggaaggggagtaacaatgttgttggagatattgtagctcctatagaggcaggatttccttttgttgttgaatgtaaaaaccgtgaagaatggactatagagaacttatttctcaataataaagaaataaaaaattggtgggcacaggttgttggtgatgctaaagaatctggtaagattcctatgcttatctttacccgtaatcgtgctaaaacttttgtgatgatggcttacaacgaagacctaatcaaagaaatcgaagaccgtggttatcctcttatggtctctaatgtggagtatgtagacgggtataaagatacccattgttataagacatttactactgtgttagaagctattacaagctttaaacctcgtaagagccaaggggaagaacatctactccattattttaacccaaaagagtatgattggcaaaaatctggtcttgtccgagaaacaaaaaagatggaagaagcaaaacaacttgatgttgaggagtctttggacttacttgttaattcctatttagaaggagaaaaataatggcagaaagaaactttccagaagctattaaaacttactattcttacttacgtgttcctgatttaaaagaacaagtatccagtatctctattgattttgtagagaactggacaggtcaagaagaacggtatgtacttgatacgctcacttctgaaattaagcctcgtttatacagcttagaaacagcgtatatcattgagggcttttcactaccggaaaaagaagttgacgtaaacgtagatgaattgagtaaagaagtagccgagttctttaaaaaagcatctacagacttgaaagaagcaattgaggcatctaatgacaatcaaccaagtcattcagaagatactgaaccgattaacgattgaccaattagaagtcactcctgcgatgatagacgttgttctcgaatatctacccgcaggattgcttttaacagccaataacgagggttgggatgcggtagagcctgacctgcaagaagtggttatttccaatttggaaaaaatgagaggagcatctaaatgattgaatcaagtaatgtaaatcatccaaaacactatacacagggaggtacagaagtaattgacgttattgaatacctaacttctaagtatcccccatcaatccgttactcattaggtaatgtgattaaatatgtttgccgtgcaccgtacaaaggaaaagaggaagaagacttaaataagggtcattggtacttgaatcgcagtcagtcagatattactgcaagcgtaagtaaaactacgtgctctattcctacttttgacatggaagctttcatccaagatactgcaagaggctatcgtgaagaacagcaaccattctttaaatccattatgtacatgttggatgatacagaaggaactcctgtgttccgaatattaaaccttgttgagcgtgaccttaaggctcttaaaattgcatagttactactaggtagtacagagttttactccttttgcttgtaaggcgttcctgtcagttatgttataatagagataggaaaactaaatagcaaaaggagtttaattatgagtagcacacctcgagtaaagcggttaaatatctataataccgaccgacactttaatataaacttaatgaaacgtgaagacattgcaaataaaattaaagtgaatcggttaaatgaaaaagaaattgagaaagagatggatgaactaagcgaagtatcggttgtcacaccagtgtggacaatgaacatgaagaatgaaaagtcctatctcttataccaagaaaagtatacaaatgatacattgatacagaaattatttaaacatgcaggttctgtttcttactatacagatacaattgtaccttattatgttattgaacagattgctaaaaatctaacaagtgaagtaatttatccaacaaaacctaaatatgaaaatagagagattgaaaatattcagctagcatttacggcttgtcctgtaaccattgattgtccagtagttattccagatgttagtccttatgacgttttgtttgctttacaccccttaaaaacaagtgtagacaaagtacaaatttcatttccgtggctgtcagaatcagaaatatctgatagacatagacgttattatcataaagttggagaccattatgaggttaaagcaaaatataaatatcaattctttaaatatgtccagacctcactatccatctgggctatgaacatttggattgtttgtgatagtgatgaggattttgccaatgtcgattactatgtacaaaaagaaaaaaataaaagaaacgtcaatagagaacgtgctctccaacgaaaggagaagtccgatgagtaaagataaaacaatgaaccggactgatgttgcacgtgccatctctcaatatacaggttatcgtatgaaagacgtgttagctatcttacaaatggaagatgaggttatcacacaagcaatttcacaaggaatatcaattaaaaaccataaattatggaaattgaatattaagaaaaaacctgagaaggtcgcatgggatggcatttctaagaagacgtttattcaaccagaaaaatatgtagttaagtttgtgccactttctaggttgaaagaagctatagatacttacaatgaagagaatgattagtcattctcttttttttgcccttgacataccttacaaaaatgctatactgaaatagtagaattacagaaaggggaagagagcttgaaaatactgttcttacaagattatatcagagagacccatgtacataacagtcagaatggacaatatgtagactataaacgtactgacatgggtaaaaagcttacaagtttacttaacgacataggtttaacaggtcgtgattatataattgactacgattatgacctaattcctgaaccacagaaggtaaataataaaacaggtaaagttattaaatacaaggagcctgtattaaaacttcggaaagaacctgaaaaacgtttattaaaacgattaatgaaaacaaaaccagacatcattattcctatgggaggaatgggatgtaagaacttattgaatagtacttctattacgaaagcacgtggtgttcctgtacaaaaaacaattactgatgaagaaacaggagagttttttgatacatggattttaccaatgtttagtatggaatacttgtcaatgaatcctaatattgagaacttggtaaaagcagacatttctactttatctcgttttattgcagagggtgcacaagcatttgagccaaagaaagttgagtatgagcttgttatgacaattgaacgagtgaaacaaatctttgagttcttgtctcggtttaaacctcttactgcatgggacttggaaacaaatagtctacgtggagatgtattaggtgcgaaaccactagttatgtctcttagttgggaagagggtcagggtgttacgattcccttagaacatcatgaatccccttggaatgaagaagaactagctattgtatacaatcatttacaagcttttgtagctgatgcacagcaaccaaaggtaggacacaatattcagtttgatattcgtttcttaatgaacacaaaagggtttgcttattttgagaataaccgtgatacactgattgggtattacttaatcgtagcacagaaaattgaaagctctaaacgtttgtcagaccttgcttatgaactaactgatatgggcggttatgataacccattagaagattataagaagaaatacaaggaagactacattgctcgtaagaaagctgaaattgatgagttaaaagcttctgagaaagcacgtgtagagaaggagtataaactagcacaggctaaatacaaagaagaagtggcaaaagctaagaaattaggtaagtctaccaaatcaattttgaaacctgtaaaagaaaaagtagttgttccttctaagacagaagttaaaactgtgaatgaaattgatggtggagactttaactatgattggattccattagaaattatgcacccatacgcaagtggagatacagattgttgcttacgtatttataacgtactataccaacgaattgctcctcatgaaaagattctagctctttggacagacttctatcctaaacttacacggacacttgctcatctagaagcagaaggtatcttcgttgataaagaatatgcgaaagttcttgaaaaggtatatgcggaagaggaagaacgtcttatcgaagaattacgtaagttccctgctgttaaagagttagaagcagagcatatggcactttataaagcaggtctagaagaatggaagaaacccaagtcagaacgagacgaagaggttgctaaacttcgtgataaatataagatttctgataaggaaaacaaagttaagttcaatcccggctctgctgtccataaaggaaaagttctttataagattcttgggctaacattaccttatgacaaagagtccattaaagaaaaaccttttgataatggtgttcctgaaaacgagctaacttgggaagactataagacagataaacatgctttgggctatatcgcagagcacgatgaagatgcaaaagaattagcagaaatgctactagaatactctaaagtaaacaccttgaagaacaactttgctcagaaacttccgttactagcttcaaacaaagatggaaaagtacatggttcgttcaagattactggtacagaaacaagccgtttatcttctaaagaacctaatatgcaacaagtaccatctaaagttggagaccctaaacgttttgactatacgtacccaattaagcgtatgtttaaaacaagctttgaaaacggagctttattacagctcgactactcagccctagaaatgcgtattctagctttagtagccggagacgaagcgatgacccaagctttcttagatggagaggacttacacaaatcaaccgcttctattgtttggaaagtacctgtatcagaagtatctaaggatatgcgtaagaatgctaagagtgttaactttggtattgcttatggtgaaacacctttctctattgctcctaaattaggtgtaacaccagaagaagctgaacgtatctttgaagactactttgcaaacaaaccacgtattaaatcctttattgatgaaacacatgagtttgttaaagaaaacgggtatgtagacaccttacaaggacaccgtagattgattcgtgatgcgttctctaaagaccgtaatacattcaatggtgctttacgtaagtcagtaaatacgattattcaaggaactggtgcatacttaacaaacatgtctctggtgtatattgacgattatctaagaactaaaggtatgaagtctcgtattgctattacagtacatgactccattgtaattgattgtcctcgtgaagaagtagacgaagtagcaaaagtagcttgttttatcatggaaaacctaccaattgatttcttaacaattaattggaaaggagaacaaatgagattccctattgtagctgacgtagaaatcggagaaaactacaatgacatggtagactatgatgcagaagaagtgaacaaatttgcttcttataaaggatacgttaagtattacaaagaccaagctaaatttgaagactataagaacgcaggtatgattagtgaggaacaaatggaagccggtattaatgctgttaaggcttgcatagaacagtacaaactaattgcgtaagtcttacaaatttatttaaaaaaattacaaaatgacgttgccctaacatgtaatgtgtgctataataatagagcagacaagttagggaatgtctgtaatattggaaaggagaataagacagtgtgctagacttacgagtgaacgaccttgaatttcgtaagatacgagttaccgatgaaaacggtgaaactattgtgtttgaccttacagaggaactacaggtaaacgagtttagtgttcggcaagcgttcttagaacagcctgcgaaatacacgtattggacttctttacttgaacgcttacgaatgtaccaagaaaactacgagttacaagctgagaagcgtaaagcagaactgtatgaaccttctagaaagtctttgattgagcaaggggtaactaagccaacaaaagaccaaatagaagcacagattatgcttgacgaacagtattatgctctgagacagaacataattagtttaacatttaatgttagacaagtgcaatatgtagtaaaagcctttgaacaaaggaaagacatgttgattcagtatggtgcagacttacggagggatttcgagtatagccagaaagtgtctatgccagacccactaaaaggtcaaaggacaagttataacaatccatataacacataaccttagaacctagttgaacaacacataattcgagaaaccaaaataaaaaaacaaaagaatggagaaattaacgtgaactttcaagaacaattaaaacaacaacttgcccaacaaaaccgaggagaacgtgccgaggtagactatccttccaatcatcttaaacacaaagagctgtttattccaaaagaaactaatcaagtattagttcgtatcttacctcctagtgtttctggtgaaaactataaccaaatggttcgtgaaatcttcttacaagcacataaccgtaacggtaaagaactaaaattaaatgctgtcttatctgcattccctaacgtagaagacccattagaccaagcacttattaactggaatgcacaaaaccgtgttcctaacaaatggaacaaaaatgcaactccaactaagaagtatcttgctaatgttatccaattaattagagacccacaaacaggtcaattccgatatgaaacggatgaacaaggaaacttgatggtacgcctattcaagttatctcattcagcttgccaagctattaatgctaagttaactgatactatgttaacaccaaactttaacccagatgttcctgattctgttaaacaatacagcttcatttcatctgcggaagcattcccagtaatgattagcaaacctgctaaaggttctggtcaaatgtcttacggtgttgatgtttatagtaacatgcctctaggagctttaccacaaggatgggaaactcaactagaagacctagcttaccaagctacaccttcatacagctacaataaagagtacattgattactttattgatgtagtaaacggtgttgaacctgtgagccaagcacaaggtggacaacaagcacaaccacaacaaggctaccaagctcctgcaatgggacaaggttttgcttctgctccacaacaacctgcttacaacatggcacaaccacagcaaccaatgaatactggttttaaccaacaacctgtagctccggttcaaccacaagctacaaacatgggtactccttcatttggtcaaacaaatatgggaacagcacctacaatgaacggtggatttgcgcaagcaccacaacaacctgtacaacctgctccaattgcagaccctatgggttttcaaatgccaatgaatcaagcaccagtaactgacccatctactatttcagatgctgatatgccttttaacatgcaagcaatgccagatgtaacaccgcaagcaacaagtgttcctgagcaaccagtagttgcaactcctgaaccaccacaacaagctcctgtagcacctgtagaaacagctacaaatactactttaccagatgttgatagcttgctacaacaaatgcaaggttagtaatagaggaacagggggctgaaatagccccttcttctatttaaatttgatatgtaattcattactaggaggaacaaatcttggcaagaaaaagacaaagtgaaacagtagaagcaggtacaattgatttaacaaaagaattgggcttaacttcttttagagatacaaaattttctagtgtagcagaccgactacctacaatgattcctcaattagactacatcttaggcggaggacttccatttggacgtatggtagaggttatcggaatgaactctagcggtaaatctacttttgcagtacaccttactaaaatcgctcaattattgaaggttccaacattgtggattgacgtagagggaactgctgaccctgaccgtttagctgaactgggagtaaatcctgatgcaggggatgtattcatggtagagcctgctttgaaaaaagacggtactaaggatacaatgactgtagaacgggtagcagaagaactacaacgtatcttaccagtaattaataagacaggtaaacctattttaattatctgggattccgtagcacagaccgccgctgaaaaagaaattgaacgtggtgtaggtaatcaacaaccgggtattaaagctaaagcaatggcacaattctcacaaatcattgcacctttaatgactaattcgaaagcattatttgttgcaattaaccaagctcgtgatgagatgggtagtatgttcggaggtattgattctccgggaggacacgcacttcaccactgggctagcttacgactagaagtccaaaaagcaagtaagattgaaaatagtgaagtaaacgcctttggtgtagaagaaaaatcttatatcggacatatcatgcgtattaaaacgttaaaatctaaagtatccagaccacagcaaaaagctgaaatgtacttaatggctgattcaggtttagaccttgaagaaaacatctaccgtgcatgttttgcaactaataagcaatatggattaattagcggtggtgcatggaaagcttacacaacagatgcaggtcaagaaatcaagttcaattctgaaaagaattgggtagacttcttgaaatcagaagaagggcaacctgtacgtgatgaactatttgctaaaatgatggctcgtagtttccctaatggatatgcaccttataaaaatgaagagattgatatttgtcaaataccattatataaatacgttaaagattacatggaaactcataaagaagaagcacatcctgtagaagagcaaacagctcctgtatctgcaacagatgtttcagacttattagaccaaattaagtaaggggcgttatgcccctttttataagagatggaggaaacctaattgcgtaaaactacaccagttaacaccgtactagaagccttagaaatgtttcaacaaggaacagcaactacagaggttcgtacgcctatttctttacaatctgtacgtaaacgtttcttagatgctaaagaagcaggaaaacgtgtattgattgaaaactctgatttaagtagtgcaaactctgttgttgttgatattgactatgtaggtagccgttggtgcttaggttatcaaaaagtattgtactttggagaagaggtacgtattccacatactatccatttctgtgatgtatacggagcttacggtaatgaagcacaaagaagcaaacgacaagtgaaaattatttttgaaggagagaacccttttgagtagagaccttaacaaagaggaacgtgagattagaaacggaaatcgtttcatcactgaggttcacggtaagggggtctttccacgagatgttgatagactgtaccaccgttatgccaacttacgttacaaggtctataacactcataaagactcttttcgaagtgaagcctcacgaaaagaactaagaagttatattgatgaacaatttatcaagttaacgaaagaatatgatattaacggagaggtcgattttccgggatatatcaaaaaagctcttaatctaagagttagacatagctttgtgaaaggacgttttcgtgatagtgctcgtgaacgtctgggagcagaggacaacgagattgaaaccttactgggaacagacacctcttctcaggaagcaattgaagatgctgaactaattgatgatttactatctaaagcgaagtttagccctgtagaactagctgtattcagctacttgctacgaggtaaagtaaaagatgctaatatcattaaagaggtgtcagcgaagtataaagtgtctcaaaagtccgttagagatgcaatcaaaaacgtgcgggagtacgttgcgttaaatcttaaagaccgatagaattagttaaaatcctccttgtgtgtatgctatattagcagtagaaacacaaaggaggatttttgtaatggaagaacaaaacaacactggcaaatacgctccatttattcgactaattgtaatgggtatctccttcgtggctactggtttaacaactatgtttggttgggaaccactaccttttacagacgaacaaatgaaccaaggtttaatgcttgtactttctgttggacttgctatctataactggtacaagaacaacgctgttactaagtacggtaaagctaaagagcaagcaggtaaagaagttgtcggaactcgacaagacttcaaacaacaaggctaagtttgagggggtaaaacccctccttagttgatattaaaggagtatgacaatggaactaacaaatttaagtgctaaaacactacccgaattaaacgggaagtttcttgttgtagagactctatcagacggatacacaggaaccgtaaacggtcattataactatgaagttgttactaaaggtgaggactatgaaatctatcccacactttggaacaacgaaaaagcgcagtttgtaaaagctgacgaaatggttgtgtatacaaacggagatactgtattctatgtaacaagaacaacaaaagacccctataaccatgctgttatcagtgagttaatcgttgaagaaggaatggataaggataagcgcacccttcaagctttccgactattcgcagacgatttattctctatcggaaactataacgtgttcttaacacaccaaattgatgtagtagacagcccaaataacgtaaaagttgaataagtttccttagacaaagaatccggaacattatatgtgggtgacacagtagaattaacagcaactgtactaccagaaaatgccacagtcaaagatgtaacattctctgttgttccagaaggaattgctactgtaactgctactggtgccaaggcaacagttacagctaaagtaaaaggttcagctaatgttatcgtaactacattagacggagacaaaacagctcaatatgctttaacagtgaaagaacacgtttcagtttctggtattactttaaataaagaagctacttcaattgttaaaggtgctgtagaaacacttgttgcaacgataactccacctgatgcagaaaatacagaagtaaaatgggcatcagataaacctgctgtagctaaagtagaccaaaacgggaaggttacagcagtagacggtggtaccgctaatattactgcgacaacagttgacggtaagaaagtagcaacttgtgttgtgacagtaactgttcctgtaacaggcgttacactagatatgaatgctattactttagaaattgacggtacacaaaaattagtagcaacagttgttcctattaacgcaacaaataaaaaagtaacgtggaaatccgataaaccggaaattgctactgtagaccaagaaggtacagtgacaggtattgcagacggtacagctaacgtaacagcagaaacagaagatggtaagaaaatagctacttgtgctgtaacagttaaccctgcgcaagcataatatactaggaaaagaggaatactaaaatggctaaagaaatcgcaaatattgcagacttattaaaaccaagcgtaaaaactgtcgaactagacggtaaatatcttgtagtacctaccctatcagatgggtatactggtacagtacagggggcttatgcttatgaagttaagaaatcaggaacagactacaaagtaagtgaacttatctatgataaagataaaaacacgtttactcctgcggatgctccaattatcatgacagatgacgatacaattttcttcgttactcgtacgttgattgacccttacaactacccagtaattagtgaggctacagttaaggctcatgaaattaaagaaaaacaagtacttcaagcatttatcgcctttgcagaagacagattcaaactaggagtatacaacgtattcttagcagatgacccttatatcttgcaagacagagcagaagaagaaatcggcggataataaaaagagaccaaaaaggtctctttttttgttgacaaacaaaatactccctgatatactttaggtataagataaatggaggagagatttatatggctatagtattaatgggacttacacttttgtttatggttttgaacattgtggtatggaatgctaagagcaaaaaaggagaaaagagttctaataagttattatttgtattaccaagtatattcggtgtcgtggctttcgttattgtgctaactatttcaccagtacttaaccgagctaatatcattaagtatgaggtacgctctgctgagaactatgtagctagctacataggggaagtaaaggcttgggaagcacgagacaccaaagaccctgtaatttttaactacctgcaagagtcaaaacaagacctctctagagctaaagtccaactagaagatgcaaaagatgaacttaacaaattagaacaggcaaaatggtggtggaactttaacttgttctagtacaaaaaacctgtacaaaatttaaataaagtgttgacgacttacacctctcttggtatacttagactatactaaataagagaggtgttttattgtggtcaaagctaaaaatcctgtacaaagacgtaggggaacttacaacagttgtgatgtgctagttgaagaagagaatggtttcttttattatagtgtacttaacgcagatggtaaagaaattatcggtggctttagagataaaggctcccaagacatatctacattttacaactacttacttaagttagtagatgactacgttaaatgtccagagggttttgttgaagatgtttaaacgtaagaaatactatgtagtccaactagttgttcaaccagatagtaagccttggtacaggtcaatacttgtccaaagagaagacgggtatctgtttacagaaggttataacagaaaatgtcaggtagagccaatgtatacacgtcttggtatgaaatataaaaaagtttttactgaaaaagaaatatgtgcaatcaacccagattacatgtattttgcagtggaggtgaccaaggatggcagacctattaatgataactaagaagaatgttcaaggttatgtattaaactacttacttaagcaattagctgtgaaaagtgaacacaactacacttgtgagtttttagataagtttaacttacctgatattaaaaattatgcgaataaagcagatgtactaattatttcaggcttccctttttatgagagccaacgtactactgtggatgaagcattacaggtaatgaacaatccgtttagtcaattctttcacttagcaacttttggggatacctatagcaacgagggcagttttcattcatatgtagatgaattagtaagccctgtaggaaacttccctaaaataattaaagaactagagaacttcttgaaatttaatgatgtaattcggcacctgcttctaagtgatatggaaagtatcatcgaagcaaccgatgcgtataatcgttatgaggtaacagatactattctagactgggtttctcttgtagaaacgtacagagagcagttatacgcaagatacggagtaggtacagacttagaggagatacttgataaggataaaaccttagtcaaagcattgcgggagaaaaaagacgattatatcaaaagaacacttggcagaacatctgcacaggtaatcaacggtacggtcgtatgttttacttacgcagaggaatatgtaaatgaggtagcccataaactgattgagttttatcaatcgtacaactatacaaaagtagctgtctttgttggacgacataccaaaggtgatgatatgttcagtattcgaacagcaggtatagatgcgggagaacttgcctataaggtaaacagaggtagaggaaaacctactactgcaactgttttcttaggtaattcaggtcaatccacattcaacgcattacttaacacacttgctcaaattgtataacaagtaagtgtgttataataatgttaggtataaaacaatacacagggagtgtgctacttgaaaaagaataaaatgctagaagacctaatgaaacaattagataacccatacgtaattggggcaattattgcaggaactttgcaacatgactttaaccgtatacacgttagcaaatataataaatatgctcgtgagtttggtttagaccgagagaacaaagaaagcttagaagcactaattgaacatttcgattctgataagttattaaaggaattgtacatgtcaagtattgcaggagaaattaatgtggacatgcttcgttcatttaaagataaaacgaaaaaatccgcattccaaactttgtctccattcgtggtagataatcaagcggttctagctcgtaatcgtgagttcaacaagattcaacgtgagggtgcttacttagaccacttaatcgaaggcttgaaagagcacttatccgaagaacttgaaaatactaatacacttaaatatattgaaccagaattacgagtaaaaggcaagccaagtgaccgtgaaatgattctatgtttatctgactggcatatcggagctttcgttaacaatattgatacaggtggatacaattatgacattttccgtgaacggctaaacagtctattgtcagaagctttccgtattgttaaagaacaaaacattcgaacagtacatgtttaccatattggagatattattgaacatatcaatatgcgtaatgtaaaccaagcatttgaagcagagtttccggcaacagaacaaattgctaaagggattcgagtattagttgaaacactaaatgtcctagctaaagcgggtctagatgtaacctttggtatggtaggtggtaaccacgaccgattccaaggaaataaaaatgataaaattcataatgataacgttgcttacttagttgtagaccagttacactttatgcaagacttagggtctctacacaaaaatgtaactttaattgataacagacaagacgtttacagctttaaagacaccgtagcaggtaaacgcattaaagttgttcatggagacaatgaaggtaagaaagtagacgttaagattccaaaacatattaaagaagaagttattgagtatttaatcatgggacatatccatacaacacgtattattcaagaagactattcacgattccatgtatacgttgggtctcctatgggtgcaaataactattcagcagaaaacaatctaccaacaacaagtccggcacaattaattatggtcttagaccctaaagtggatagcccacaatttatgccaatctttttgtaggagagtgatagaatgaacccgatttattttttactatctatcatgtatgtattcgagtttggacaagcattcttgaatacgaaacgaaaagaacgatatatgattgaagatggtggggaacctcttcctagaagctcttacgtgttcttattcattcaatatgtattgcgtactcttttcgcaatcttgcttatttttattgtaccagagagcctacagttcaacgtaggaggtattactgcctttatagtagttttgcttattattccatttatctctcggttcattgaagttggtattcgggtattgattattaaatacttgcaagccaagcacataaaacgtattaagaaacaaggggacgaaaaagagactaattagagtctcttttttgttatgttatattaagtattgaggtgaaaagaatgaaatatacagaaatccaagtaggtgacggacaaagcaccttattagatgtaaaaagcaaacctgccttaattcgtagaggcacattaacaatgaaagttaaatcaagagatagtctaatcagtaaggtagaagagaaacctgtatatattgttgagctagcagaagaatcctatggtacaagcgttgtttctgtttttagtgcagtacaggagggaagcggagaccatgtagttgttcagaaggcttacacagagaatattacgcaaccatcgtttaaaggcaccacatttttaggtaaggttgctcaaaaggttcatgaaaagagcttaaaaccaaaacgggtaatcacaactaaaccccctgtttttctagcgcctgttgtcatgggagtagacacctttacacaggaacacggactaggattttatgaacgagaaccagataaatttgttatgaaagacgggcatcctagcattgagtatggaaagaacacaggagtctttatttgcttaaactctattaagtgggataaagcttatgtcaatgcaggacaattgattcaagactatgtagcagacaaacaactatggtttaatctgggaggaactaaaccacaatttaagagtgaagttaatcaatgaccgataaccgtttctatgaggcagacatacaagaactaatcttgaacaaaaaacgtatttttggagacatcggggaaagtgctattgtatttgagaaagcagttatgagagggaatactatttgtgattgtttaatctttacagaaaaacgaggcgttattggtattgaaatcaagacagaacgtgactcaacaaaacgtttgaataagcaacttaaagactatgaaaaagtctgtgattttgtttatgttctttgtcatgatacacatgtaccaaaagtggaacagattctaaatagatacaatcatagacatgttggtattttagcttatacggagttcatgggtgaagctatgttaggaatatacaaagaagcaaccccttcaccaagtaaaagcgcttatcatatgctagatattctttggaaagaagaaattctaaagatgttaggtacattcagacattacggtattcgagtagagactgctacaggaaccaaatttatgcacacagctaaccgtagtggaggtgtgagtggtctttatacgaagtctgcgaccggtaggacgatgcgaaagccagacttgataagaaaccttataaatcgtgtaggaggtgctgaggaggctactagggtcttctgtgacgtgttcattcataatagacagcatccagagaaagctattaagttaagacactttaaacagcaaccaataaggagtgataacaatgagtaaacaaggactaccttttggtacttgggagaactccgcaggaagaaactacacagggttaggtaatacagataatggacataataagaaacgaatgtccacaagaggatattactacgtagctctgacaaaagaatataggggactaacagagagggactttgaactaaaacttgaatatgggaaagaccttgtttctcaatatacaggtgtaccgattgacatgcttgttcttcggaaaaaagcagaaaaacaaacactttcgtctatagatagtgtatactatgtttgtcgaggaaaagaacctatcggtaagctgtctgtaagggcacagagacggtttaaagaccttggactcacatttgtatacctagagaagaactacgcccctaaagtggtgagaagggtgtctaagggacagcgtagccttctgggacaaacgaaatcagataaacgtaaagcaaaccgaaaacaaaagaagccaaaaacaacaaattaggaggacaatcatgctaagtaaggggaaacaagttacacttagaaagttaaacaatattattacaaataaggagtacatccttataggtgctcgttacacgaacgattctttagaacgagatattcctattacaactgtaattgacgatatacttatagatttgaagaaagagacaatggcaggctgtgttttctttagaccagtaggagatgcacaaagaaatgcgctatctctattaaaagatgcgtgtatgcactttggttacggagaatttttagacgaagctattgaacgtcctgcattgtatgcggggctaaaagcaaacgttatgctacctgacacagccttctcaaatatccaagaaattccattcaatttttatttcacagaaccagaagtattttgtgaagaagtaactatcaagggaagaaaacatattcagtacactgtcttagatagaatcagtttagatgatgtacaacatgtagaacaatctcttgttgttcttttccgtaaagcagagtatgatggagaaaccctgttaggtgcttatacggatacaaaattaacaaagacagaagcaatcaaaatccttcaatttgttagtaatggttccttacttgaacaggtagttggggcagttactgtattctcagataaagtagtgtctacacttattcctttgtttaatgatgtagatataagctttatgaaatcaggagaaggaaaccctgttgtctctattacagcagatacaggaggcattgcctttgatgaaaaagatttggacggtatgtctattgagtctcctagtttcggagcttaccgtcttgtgttacatgtagggaaggatacagtaagtattttaattggataaattttttttgtaagggagtcaaattatatattgactcccttatttttgtgtgctaagataagttcagttgttgtacaaggttacaatgacaacatgtacaggagggaaagaaatgagtgtagcatcaagtttagatagagctgatgaatggttgttgtcgcatttgtgtgataagcgtttagagtatttgtctcaaaaagaagagttaactgcaaatgaaaaagcagaaatattactaattcaagagcttaatatgaaactaatatgtaataccttacaaaaagagacacctgttcaaaccgtacagggttctgacgttactagtggcttattaagcaaagcttacacaaactctgttaacattacatcccaagaagcgtggtatacatctttgttgaaacgtacgcttgatgttgttgatggaataccttgtgtaggtaatgttactgtatttgtggactcagatgagattagtatttcgattatgggacacatacgacacgataatgatttaacctgtgatgtctacgaaatttcttttgaaaaccttggaggtatcgaagattttctaattcatgttgagggagtagaaatagctttaccggactatttagagtttattaccgaggaactacctgccattttaaaaaaatcattatgaggagagagaataatggatttaaaacaagcttacaactatgcagtagaacatttaaatgaaaatgccaaaacagaaagtgaacgtatctatgtattgggtgtcttccaactaggaagccgatatgccggatacgatattgaatcaagtgattacgattttacagtcgtttacatgccgtctgcttatgatttattaaaccgtgagtatggacgtagcaaaattaagtttgaacacaatgattatgaagtggaaatgtcctttatggatattcgcaaatacctaaatcgtttattatcaagctcactagaaacattacaaatggtgtttgcaccatctagcatgagctactatgctaaatttggagacgataacctatcattgcgagcagaagaacttgtagatttcatgttaaaactacgtgataaccgtaagtcttttgtttatttgaacacagataagctatacgattcaatttcaggaagagcaaagtcttctatgggtaacgctagcattagttacacaaatgatgaatatggtcgaactgtcaagtatgcgattggtgttgaatacatgcaagacctacttcaagcattatactacaatgaagacattcgagaaggtttgactgtttcacctatgcaagcacctatttataaggaacatcgaaacaatcctagctatgaaattgctcgtttgtaccattctcgtgctgttaaccttattgagaaaatggtcttaaacaaagcagtggttcgtgaaactttacgaaaattacagccgaccgaagatacaattaaggtagtaagagaagtgtggacagaggagtttgtaaacattatcttgggaggttatgacgactaatgatgacaacagcagtaaaagaaagaacattagatgaaatcttaaccaatcctaagaaaccgatgacagagaaactggttgaagctgaacaactaatcaagaacagtgagcatgtttatgactttgggttaggtacaattaaagaaactatggtgatgtctgacaaaaactggttagctagtcacttatatatcaaagaagttactacttatggatttatcttgcaagccgttgtatacaaacagtccttagttgagcgggctattactaacgatgaaggtgaagaaataaaacctgcttcttatgactatgagctaaaccgtgtctacgaattagagtacagtctacgagataagtatactagactacttaaaaatggtagccctttgaaattctcagagaacaacatcaaaaacatgttttctggtcaagaaggggttattcaaaaactagattcctgttgtgataccgagatgtactcttctatgtatgacgtatttagttgtattggaaatgaatcagtaccccaagtagctcgttttcttgttagatttatgcaattgaacgtggttgaactaatttacaaaagtggggtgcctattccttttgctaaagactttgctagagaccaagcaaagaaacttgaaaaaggtggcagttggtattgtagcccagaacctacagctaagtgggtagattgtacagctacctctcctgtaaaggttcttaatattccaaagtccttgtttaaaattatctgtcaaggtgatattaccttccgtagatatgtttcaatgtacaaagcaatacgtaaagcagaaaaaacgggttttgaagaggaacctcgtgaggaatggaacagggaactacgaatgtatattaaacccgaagaagacgaagctattgtacaaaaaaggaagaagtacaatgagaaatgtctaaaacgaaataaacagggaatcattcgagcttgtggtgcactgtatcatctatttacctttgctgtggaactagacaacgaatatggaatcgaaaaagctagtaaattagcttcccatgagtttgaagacatgttatctagggaagtagagcctgagtctatagataacttatcgaataattcagcggtttgtattgctttttctctaggattggaattgaaccgtgttgcccgatacatgtactatcaattacacgtagaacaaggatttactaatggttggtatgactcaacttatcgtgactacctacgtatgatgcgccaactagaaattgcggataaaggtaactatcctaaatcactgaaaacagtacatgatgtagctgaaatgaatactagaatgattaaggataaagaactggcagataactttgcagaacaagtcaaacattaccgagagtgggaagacgttaaagttcgtggtagcaagtatattatgcgtgcacctgagagtatagacgaccttgccaaagaaggttctagtctaagtcactgtgtattcagttatgctcgttcagtagccctaggagaaactacgattatgttcttacgtactaaagcttgtccagatgatagcttggttacagttgaaattaagtacagccctagtcgagaatgctatagaattgtgcaagctcgtggtcattccaatcgagcattaacgactgcggagaatgagttcttagaaaaatggtgtaaaaaatcaggaaatgtagagagaaaataagctattttaaaatgaaaaaatactactagttagttcattttcttaagttagctaaaacgattcatttcaaataacaattttccacctacaaatgtttcatatataattcacagaaaaaacacaaaaaaccctacagttatgtggggttttcttgcgtttcatttatatctgaaatttaacagttatgtgtgctatattaacagtagaacctaagaagggcgggctttatccgtgttcttagaatatagacatgttgaaggagtttgtatttgaaatggctaaaaaagacttaaataacagttcagtattgctgaacctatatcataataaattattggtatccaaggttgatgaagccctagacgagggtaaaccttatgattttattattgctttttgtaaagagaaatttgactttgaaatcagtaaacccgcattatctcgttataaagaaaaacgcagagaagcaatcgaacagggtgtagaccttgaatctttacttgacaaaagacgaaaatctggtaaagttatagacctaaagggaaaagaggttgaaactctaccaaacacgaacacgtcttatgaccaaacatttaacgcagtagagcaaatttataatgacgttgaagtgttagatactatcattcaaaaaggctttgctagcttgaaagaagtcgattatgtagaagcacctcttgccatgaaagctatcgaggttaaagcaaaagttacaggtaatcaactgcaagggttaagtctagtgggattgcgtgaactaagattacgtcagtctgctaaagaacaagcaatgaccgaagttatcttacgtttcatcccagaggaacaacacgaagaagtttaccaagcaattgaagaagcagaagcagagttctatgaaaacttagacctaacagcagaagatgcacgtatcactagcgcactcgaacaagcgggcatgaacattatctaagggggctattcaaatggcagaaaatctagtggaagtagactatagagggctgactttacaagaagcacttcaagcgctactagacaaaaaagtattactagtcaaaggactagaacaaagtcggaatttagacgtattgatacgtctttacaccgaaggagttgtacctgttactcaaatcagttatgatgttgttcctgctgatgggcattggagagaagaatactggcagatatttgatatatctgttaatgcactaagtacgtatccgtgttacgtgtacgatgcagaaacggctaataaagcacctaagttcctgattggaacaacagtttattacaccagtaagatggatagcactcgagattccgctatcgttattggattgtacaaagacgatgagggcaattggtattacaaattaagtagagaccaagaaatttacgcagagacagagcttacggcagacaggttgtaagcctgtcttttttttgtaattaaagtgttgacaataaacaataagcatgatatacttatggtataaattaataaggagagattcatatgaaaaaagaaaagatttatactaatgaagaattggaagagttgcttgcaaaactaccaaacgatgtcttatgtaaagaatatgatgcaatgacatacgacaggttttatgcttggggaaatgattcttgtgaacaagtgcaagagttattgagtaaacataagtataacttagattcaattcaattggttcacgacgtattttatgcactggaaaatttggtagaaggagaaatagaatatggaaataggtagttgacagtactagtactgtatgctaacatgtctatgtacaaaaaaaacaaatcaaggagagatgtacaaatgaaaccattcgaagacatttttgatgtgttgaacaaagcacgtcaagacaaagacaaggtaacacttacttttattgaagggctagacaatattgctagactccaaattgaggattcttctgctaccgcaggaacaactcgttatgtaaagttctacaacaatgacatccgtaagttccaatacgttgaccaagctgactttgaagaaatgtacgcaggcttagaaatgaaaacaggcaaaccaaaagaagaagcaatcgagtttccttccgaggaagtaggaattatcagtgctttaaaaatcttgcaacaaagtggtgtctttagtgatgaagacggaatgcgaactctaggaattaacacgtctacattgaaagatgctcactatatcttacagtatattgagcctgcaattgaccgttacttcgaatctttgaataaggatattgaagaattagaccgtgtaatgattaaccaatcagatgaacttaaacaaaaaatctgggaaagctttgtatttagcaaagataatctaagcaaaatgctagatgactttgaattggcaactctagacacgttcccaaatgtaccgtctaatttgattgttgatacttgttcagaagtgaagaaaactctcgaagggttattgattgaagatgcggaagaaaatcctattgaatgtcatgattaccttgttcgtggtttcgttggtgctgttatccgtattgaacaatttattatttctgttgcaacattatcttaccgtagaacagaattagaacttagagaatcaagagaagcttatatcaaagagcttgcttcaaatctatttatctttgcagaagctattgctcaggcgtatactagacttgtatgttctatcttaatggaaaattctattgatatgcacaatgcttctgagtatatccaagttatggaaacaaaagcggttcactgggtaaaagaagaagcactaggtggaactatgttagctaacaatgaggaagacctcgttgagttatcccaatctttaaactctatgacactagatgacgtacgtgaaacccaagaagaccctgaaaaggctgagtttaaagaagctttggaagaactgcttaatgagttgataggtgttttttcagaagacgaggacgaagaagaagaagttgacgaaacagaagacgaagatgaggaagaaataaaacaagccttgttagaatcattagaagcatttgaagacctgttacgttcaattcaagcccctactatggaagaagaggaagaagacaacgaggtacctttcgaaacacctatggtagacatggatgacctctttggacacttattatcaggggaacctaaagaaaaagaagaacctgtggagctttcagacgatgcaaaagcagagtttgaggaatactttgcagatgaaatcggtgagttacaagaacttcgtgaaaaagggaaagatgctgtagccttgtataataagattaatggggaactaccgttaaccgagataaaatcaatggctatgaaaaatatgggatttgcactgtcaactctgcaaaaaatgttagatagaacagagcttgactacactaagaggggtctacttgattccttagatagattaaaaggaagcaaatacaatttatttgtagaatatattgagtttttgagagaagcatataagttgtataaaacagtaggcatcggtattgttgcttacgcacatgcaattgttgaagatatagaaaatacggttgataacgtgatggacattgactatgaaactgcttaccttgttaagcttgcagttaaacagattaatcaagacattaaagcctttgaagaaaatgatggatactctgatttattagccttctctttagcatttacactcgttgttatcatgagagactatggagaaaccgacttaagtccaattagtgtagaggtagaagactttgtgtctaataaaaagccttccgttgttgtcgaagacgaagacgaggaagaaaaagaaggagctattgacttagctaaagagttgaaagacttgattcgtgggactgcattagacacagacaattctttaaacaatagtgtagacgaagaagccctgattactgattataagaatggtgtctctcaaagagaactcacaaaatgttataatataagtacagggaagttctactcaattctacgtagacatggtatcgcagtagacagctctaaagtagctaaaaaggttgcgcatgtagaagaaaacccggaagtactcgaacaggttcttagagattatatcgaaggtaaaacattagcttacatttactcaaactataatctatacaaaaacggtttgttctatctactagacaagtaccaaattccacgtagaaacaaacgttaacttccaaataactttaggcagtggctactatggtcactgcctttaataaggagaatatttgttggaagagacggtttataattttatacaaggcttaagcgggacacaattaactatattagaagatacatttgctttactaggactaatctttatacttataggaatacattttttagtagcagatacagttgaatgggtgaaacttgttaggaatccaagagtatctacatttgcaacaatacacatgtattttactttttatctaccgatgtttattttctttttggtagatggtagtacggttactacttttgttgtttcattactgatgtttgctattgtgtatacatggattgtctggcttcgagtgggtaggtacacagaaaactggtcagtagtacgtccatttgttacctatattaaagcacaagaccatgtatgtacgctaattattggttcagcacttttaagaacagtactattttttataaagattaggataggttaagaataggataggatggaggataagatatatgaatgaaataatgagttatgtttggttgggtgtgtttattgctatacccctaattggctttatctacgtatataactacaatagaaaaaacccacgttggtaccttcgcaaaagctattgggcgccactagtgatagacttagttgtttttggtgtttggataatggtgggcgtaattatactagctgttggacatacagaaactactattaaaacatttaatattgaaccacttacggtttatagttcaccagaaaatgtttatgcaaagataggtagcacggatgacagctatgttaactttgcaattacaggtaagggaactcattctgcaccacttggtaacactagtatccattacgttgagtccgaaggtagaccgaaagtcacagttacttactacaaattagactcccctttctcagcctttatgggaatgcagggagaacttgtaactaaaaaaactcgtgtagatattcaagtacctgtaggtggggtggatgtcacaaatacaggtagtacctttgaagagcaatcagtaaatgatttacttagataattccctaagtagcgggctacaaaaatccgctaagtagcaggctagagacatcttttataggtgtctcttttttattgacaaacctgtacagctatgctaccatatacatgtaaataaaatgagctaaaaaatttgagcttacctattgacattaaacaatgtacaggctataataagtttgcaagataaaacgaaggaggaatttacaatggaaaaacaaaaacaagtaattacaagaaaacaatatgaggagattatggcacgttataacaaaatagactatgctatcattgcaggttttgttatctttggcacagtcatctttggttttgggggatttgtatttatggctattgttggtgcgtttacgttcccacgtatgaaacaaaaaagcattaatttaatggaacaagactacattgttagagatgacattcaacagtaagcttaattgttgactatggaaattacaggtgttactataatggtacaaggaggacaaagaaatggcagaagcaaaaaagagctattctgacatgacagaggaggaagcacaatatgcaatggtattaggtgctagaatcgctcatgcacgagaagggttaggtattagtcaaggagaactaggtaagttagcaggtttcaatcaaacaactatctctttaattgagacaggtaaacggctacctaacttaaagacacttatcagattgagtaagattcttaaaaaaagtttgaaaattacattggaatgaggtagagaaaataaaacagggggagatttattatgacaacgaaagtaaaagaaacaaaatcaaaagtaaagaatggtgaacgtacaccgaaggaatttgtagcagggatgaaacgtagtaagaaagacttgtcacaaacgcaagtggtaacctctttaatggaaaactatccagaacttacaccaaaagacatccaagaaattacaggtattaaacgtggaactatctatacaatccaaagtcgtctacgtagtgctcatcgtaaggaacatacaaagaccgcagatacgccacatatggataaggtagagtctattagtgaaaccatgagtccggaagctattggtaaacaagacttattcaatcgtttagctgatgtatacttaaagaagattgaagaaaccgaagatattgaagaagctagcaaatacaacatgttacttattcaagtaatggaaagtttagataaatgatagtagggttctttatatacaatttaagagtcctgattctaccgtatatttaacaggaatgtacgatagaattttatttacataaacctattgacattaaacaatagataagctattatatacatgtaagataaatacaagggagatgtttaaatgcaaacagcaactaaaaattttgaagttatacgtaagacagatgatttaatttattatcactttgcaaaggaaagcagttacgctatcaataaggcaggtaaacaagagtgggaagaggcaatgactgaatatgtgaatgactttcttgaacaggcttacggaaacatcccgcctatttcagtgtatatcaattctagactttctagaacattaggttggtttcaatattatttggaagacaatggtaaacctccgtatattgaagtaagtagcaggttagtaaaaagtgcgattctgctaacagatactgagcacaaggaacttgcatacacagtaattaacgacctgttaagacatgaagctattcactatgcgttgtatgtactagataaaccttctagcgatggagacgatacttttgaaaaagacttgtttgtaacagggacatcccctagcctaggtacaccagagtataaagtatataaaaacgagtttcctagattactatgtaaatactatgcaaagtgccctgtatgcgatactgtgcttgcttatgagaccagaggacgttactattgtattcatagatgtgtagaagaggggaaaacacatccagtcatctttagacctaagaatgaattaatcattggggtacagccccacgtatcttacgggagaaaactactggaaggaacatatgatggagcagttaaagaatcttacagaaaggggatagttaactaatggaagttaaaatagacttaacatcgggtacagctacagttatttttaatgatagtcctacagcaataatagaaaaatatcgtcattctatctcatatgatgaagtaagtaattaccgtaaaagagggcatacagtttactacgctaaccctgagtatcgagacccctacgtacttaaagataaagttgtaggttccaattggaaagaatacattgatagcatgaatgaattgcgggaacaaattactctagcagagaacataggtattacagtcacaaataaggaaagctatgaaaaagtatacaaacgagctttgaaacagtatgcacagttactagaaaaagaaaagcaagaaaataaacacagacgtttagttaagctactttcttctcaggactatgaaactttagtaactttaatagaaacagcttcttggcatctgttagaccactacgagtacgaacatgcaccaatcccaccgaaagagcaagctgttattgacataaaaactaagtgggatacaataagtaggctagagggataatatttccctctaaaatttaaacatatctattgacaataaacaatagtagagttatactatgtatgaagataaggaaagggagagatgaaaatgttaaactttaacaaacacgtaacagcagaagatattatcagagatggagaatacaatgatgcagtggtagaacatattattggagaacttgaaacaagtgatgagaagaaattaattctgttcaaacaatggattgcagacaaaaaagaagatggagacacggaagctgttgaatactttaaaggtatgacagacaaagaaattttagtttacatggacttagacgaaattgtagaatactatgaagaaacaggacttgcagactttgcagatagtttagacattgactggacaggtttactagaaagctttggagtagaatagggggaactgacttgaacgcagaaaataaaataagaagagggcgacctcgtaaatacccagagggagctaaacgagtagacaacacaagcttgatagtcacaaagaaacaaaaagaatacattggtagtatcgcaaagttaaacaaggaaacagtaaaagagacaagtaacaggctactaaaagaagttttagacggcaagtttgattacttgttaacacctattgcagaagaagatgtgccatctgtaccagtaacggtggataggaagttggcacatgaggtacaaaagtatttagagggttacaacgagaatgcttcggaagtactgaggaaaatggtggaggagtttatgattatgacagacaggacagtgaaagtggttggtggctacgaactgggagtgacttccattacaaaagagcttaaacgattctggttgaaacctacagaggaggcagaagaaaatatgttctttatggatgcttccattcaactagatgtggataaccgacatgtagttattcgtgaaaaatctatgggtgtccgctcaatcaatcaaatggaagagcttaaacgttacaaagaccaactgatagagacagcttcccaattacaggatgcactggatacttacgttgcgaaacatttaggataaacttttaggatataggataggataaacaggataggataggataggatttacttaggataggataggataggatgaaaggagacaggacataatgttaagtacagcagaatacgattcacttagagagtatttagtagccgtaattcataaccaaattagtgaggacgagagagacacgcaaagcttagatatatggaaagaagaggtcgataagctgacagtagacaattggagagaacgttgcatgaacctagcagatttgttatacgtagatactcccgcttcactggcagacatttacaaagactataaagaggagctaaacgaaatactcagagattacacagatgagttacgtgcaggagctacgttcaataaggtagctgacgagcgcctagggtggatgtgggaagattatgacccattaatactagaagcacataatcaaggtctagtagctcgtctagggcttataatcgttgctgaacaacttgccactcaattggagcaagggacgtttacaataccatatgataactaagtaacaggctagcctaagtagcaggctagcttttttcttctaagtaacaggttagctaaaatcttctaagtaacgggctacagtaaaaaaactctaagtagcaggctacaaaaattccctaagtagcgggctacaaacagcttataaaattccgaggcgtaccatccgacagccagatttgtcacctttgtccgttcgatatgccacaactcaaactcgctttttccttatatatagaagaaaaaagtttttcatcttttttagtgttttttattgacattaagaaataatcatgatatagtatagacagttaaagaaaggagaaacaaaaaaaataaataaaaaaatttaaaaaaagttattgacattaaacaataaacaagctataataaacatgtaagataaataagagaaaagaaagagagtgttaaaaatggaaaaacaaattattgtaaactttttgaaagagattgaaaaaaatattaaaatggtaaacagaggcttaaaatctgagaacgaaactcacagcgaacttgttggaatgtatgacggcattaagttggcaatgaaaacaatcaatcccgacacggtaaacattgacttgcattatacacgtacaatcatagaaaactattttttaggcactaatgaacaaaaagaaaatgccctagaagccttacaacttgcgttatcagtcgcaaaagactaacatataaaacggcgggacacgttcccgccttacataaaaaagttaaaaatttttatgtttatctattgacattaaacaataaacaagttataataaacatgtaagataaagaaaggaggggaaaacatgaaaagcaaagtaaaagcctttttcatcgcaaggagggaaaagaaagaagtaaaagagattttacagacaagaaacaaggcaataaacgagcttaaaaatttaaataaaaaacttatacaaaactattgacaaaaagagataaacactatataataaacatgtaagataaaacaaggaggaaaaagaaacatgcaaaagaaattatacaagaaaagagatttttataaaaagttggcttcattcgctgttatgtttttacttggttcagttgttacggcggtattttcgttcacagtgtcacttattatcggtttgactttattcatttttgcttttatgatttttgatgacttagattatacagtaagaaataaataaaaattttagtcaaaactattgacaataaacaataactattgtacaatgtatttgtaagataaataagagaggaattgataaaaatggaaaacacaaaaaaatatacattagagggcttgaaacaactagcaaaagaaagcgggtttgaaatcgaggaggtaaaaccaaaattacacgaggttaaccgttattattggagcggtagcatttacggcggttcagacttcattttcattgaccacgatttaaaaattattgtaacaggtaacacacgagcaacaaaaagcgatatgtatacaagaaataacacggaatgcaaacgaaaaagagacttgaacgaggaaaaagcttactatgaggggctagggtatcaagtatttaataatgaggctttctcttatgaggctttacgattattacagaatggaagtgttaaccgctcactaaataaagagtatagcttgcaagaattgcttgacatgaaagactaacatataaaacggcgggacacgttcccgccttacataaaaaagttaaaaatttttatgtttatctattgacaaaagacaataaacactatataataaacatgtaagataaataagaaagagggaattaaaaatgacaaaatacggaaaatttaaagcatacttttataatggatttgacaagccaaaattggtggcaactagtgttaccggacttttaagagatgttaccataacagacacgtatcaaggggacgtaacaaaagaaatgcggttagaagtgaaagcgtacaaagagggacaaaactcttttcaagaatttaaagagtatttacaagactttaatatctttatagacccaacttatttggaattaaaagaagcttcacggcaatggttcggaaacgataccccagaacaccatttcacggaatttagacaagcagaagcacaagcaaacaaagaggaaaacaaggcgctagcattggcaaacgtgacggaatacaaagacatgaccgactataaacaagactatgaaacactagaagaagcgcaaaccgattttaacgaaaaagtggaaaatggttttattcaaaatattacattagcaacgtataacggcgctacacaagaaagcacattttacgagctaacagacgaaaatattctagaagctatttatacagacttgcatgaaactgattcatatgatatgattcaagaaatagaagaaagcaccgacttgacaaaatgggactatatacgagcttatacagaaatttataacgtgttcacacttaacgggcttgtatacattgaaagagattaaggggggacggtgtgacgatatgaaaccgaacaagaaactagaagcattaaaacgggctagaatggaaaaactagcccgtgagacaatcgagaagcctatagaatttatttacaacggtaactatacacaagaagaaatgtattatttcatggaagaacgaaaacgattgaaaggaattaaaaaacgagaataaaacagttgacaaagaaaaatatacatggtatattatacatgtaaacaagagaaacacctattcggacgaactcaaaaaaagagtataaaaattttagtcaaaactattgacaaaaagaaataaacctgatacaataaacttgtaagataaataagataaaagaaagagggaactaaaaatgacaactttaaaagaagcatacaacgaaattattgaaagcaacttaaacgaaccagaagaacgcaaaacatacttacaagacttaacacaacacggggcaattagcggaatggttggcggtttgatttactacagtgaaacaactcaattctttaatgaacaccgtgacgaaattcttgcaatgttacacgaattaaaagaagaaacggggctagacgaaaaagggctattcggtgacaagtggaacgattgggaagacttattagaagacgaagcggacgacttagacccgttagcagacacaaacaatcaaaatttactagcatggtttgcggtggaagaactagcaaagaaagaacttgacgaactagaagaagcatagcaaacacggcgggacgtgttcccgccttacataaaaaaagttaaaaatttttatgtttatctattgacattaaacaatatagatgataatataaagacatagaaaggaagcataagaatgttagataaagaatatttacatcagcaactagaaagaagtttctaccctataaacgatattaaacgtttatcagtgctacacaagcaagagcttaacaacttaaagaaccatgtaagaaagggggctacaccggaacacgtagccaaacaattggaagaactaacaaaagaaatgaacgagctttctaaccttgcgtgttcattagagttatatgttagaagtgtaaagaaccaactagggaacgaactaggcaaaaacgtaaacaaacacgaataaaaaaatttaaaaaaagttattgacattaaacaataaacaagttataataaaggtgtaaggtaaagaaaggaagtaataaaaatgagtaaaacagttgaaacagttattacattgatgaaaagagcagaaaagaaaggcgtagcaatcaaacgagcaagacaacgggacatgtggggcgtaggagaattgcaagaagtttatcgagtagaaaacaatggtaaaacagtaagcttataccactatgaaacactaaccgcaaaagttgaccttgaaaacatgcaactaatagaggtatacggggaaagccgttctgatagtgatagcgtggcaactttcttatctgaattaggtttcaaaaattttgactttggttttaaaccagtaaacgggggcttttggttattcactaacaaagacggggaaagacaagaaacctatctagacgaacaaggagaaaccgccgttataaatgaatttaatcgggtacaggcataacaaaagaaagagggggaaacctctctttctaaaataaaaattttaaacttttctattgacaataaacaataaggataatataatactagtgaggaatgataaaaatgcaaatcgaaattatcgaacctaaaaaagaatttaaatttttaactagggaggaacttaacacctatcaattagaagcgggggaacttgtggaactaacttatatagtaaactacacaaaagaaacgcctaaagaattgacaagtgttttcatgtttgcggataccatcggggcaagctcgtatcttgtagacgtagaaacgggcataatgacaaagacacaaacaaaaaacccgctttctaactgtaatctagctataacaaaagtagactttttcaaaacaagcaaacttatactagaaaggaaagaaaactaatgaatttaaaagagtggggctatacatgggacggcatgaaagaaattacacgggaacaagcaaagaaacaatacaaggaaaaagaaacatttattctatatagtgatgacacagaaagccttatcgagtcagaggaacaatttaatataaagggcgttcgttacggtgtggaaaaggagggggaacaatgaacaaatttctagaagaaagaaaatcagacttgcttattcaacaaaaagaacaagctcaaaccttattacactatatagaggaaaacaaagaaccagaccaaaccatcatacaaagacaaacaaacaggcttaacaggttaagcgctcaaatatacgaaattaaaatgatacaaagaaaactaaaaagaatataaggagaaaacagacatggaaacagtaaaagacattaaaagaatgataggaacactaaaagaggatataaagcataaagaaagctatataaaggaattagacgaacaaggaagaatgatagagtcagaactattgaaagcagaagtaaaaggaatgagggacgttatacgggacatagaacaagctatatactagaaggaggggaaaacatgaaagaagttaagcttattcaattagacaagaaagaaatagatagttatcacacatggggcatatttgacacaacggaaccaatagaagacggggacagaatttctatatatgaccataaaacggggggcgttttacttatagacgttataacagtaatcaaggaaacagaaggctacttctttcttattatagaggaatagagagagaggaaaagaagaaaaagagcaaagaacccaaaaaccaaaaaaaagaccttagagcctgagattttcaaaagccgagcttttcggaacccgcttatataggcgcacactgttttttctatcattctagcacaaacaggaagctagagggcacacaatagccctaggaagccacaggaagcctgtagcggggctttacatagatttatatataattatccataaataaacagaactatgctagaatgctttaaaatagcttaaaataaattgaaatatttaatagtttatgcttgcatttcatctctttacatggtatagtatagatagttaaaagagggcttcacttattcggacgagaaacaaaataaaaaagttgagtttaaagcttgacaaggtaaaacttacatggtattataaaggtgtggttagggttaaaccttacaggaaaacgagcacgaccacacaaagaaaaaaaatttaaacaaatctattgacattaaacaataattattgtatacttaatttgtaagataataagagggggaacttaaaaatgacaaacacaactaacaaaccaaaatatttagtggtagataactacgatttagacatgtacgaactaggacgggttaacactatgcgagaagtgaaaaagctttgcaaggagcaagtagaagctacagacggggaatgctatgttatggtgttaacactgaacgaggaaacaaacaaatattctagaaaatcggcggaaattgttcattactagtacttccttgttatttaaactaaaaaccgaggtgcaaggcaaaaaacaggaatgctattgcaccaaggtttgcgggactaggtggttaaaacttgcctagggcggaacttcatagttaaaaatttaatcgtgttattttaatcttttctattgacaataagcaataactttggtattctatatttgtaagataaatgaagggaattgataagaatgaaaaatctaatgaatgaaactatctatagtaatattacattaaacctaactaagaaggcgcaaggcattatatcccaatacgtagaccataacgagggctatccaagacaaaagaacagaggtcactactaccgctatacagttacatttatcaatggtgaaacgtttgaaagtaatagcaaggcggacatcgctcactatatttcatctatgacagcggacgaactagaaaccatcatcaaggaagcacaagccgagcagtaagaaataggtatataccagttaaccccaccccgtggttttgtgaccgtatttaggggcggggctatcagggcaccctcgaccctcgggtacctattttttggactggaaattttttctagaaatttggaaagtcaacactaaaagtcaacaccttaaactaaccccaccccgttgataaggatgaggtctttttattgtgatgtactccatagttacattcctttattccaaccgcccacatctttatgagtatcgaaaccacaatcggggcagtaacctgcttgttctgcatctgttgggtacatgctatagctataatagaaagcatacatccccatgttttcatgcgtacactctgattcctttttcttatacgggtaaggacatgcaggacaggtaaatgtatactctcctgttgaaccaattaaacgttccccgcattttgggcaaatatccgcaaccatcttagtcctcccccactataaatcttgctttagcctttaatggtgcgtagtccttttctgttagtcttacataagcaacacccggcactcccggagagcatacgtaagcaactacaccccagtctttgacttcacttactgtggcaaaacatcccccaaatgtttcatcgaaatgtgggactatttgaacaacatcatataactctgtgtgatacttcatttaatcttcctccgtacttaatgagtcttgtagatagaagtcggagattccccatttgtttatataagtaatttctccttctttactacctgtcacctgttttaacttgtatgtgatttcttccccgtcttcacgagagtttccgtctttgtctattacgaacagtggagtcttctctgtgtctaatagttcgtaacgctcacctgttagcttgtgtatataaatcatgttatccctcctttagaacaatgcacatataaatacaatcaccgtagttttcactgtcatatgtgatatagtctacttcatagtctagtaattgttctgggaaatcttttgagtaaaactctgtacgccatgactgttctgcgcaatagggttccccgtcaaagtctttaatatagattcgaaaagagtcaccaactgataggatgtctctaacttgtctaagtgttaatttcaaatgtcttgcacctccggttctgtgatgtctaggacagctattacgtgtacctgtcctactccttctatatataatggtgtaaataaaccagttaactcgactaagttatcatgcctaatcgtgatagcattaaacttgtaattacacccataaataacttcatagatgcccataaaaaccctcctgtaatttatacttaaagtatatcacttagagggttaattgtcaataccaagcaggcaaagattgttcataatcgaaagaccaaccactagagtttaaaacttctcctatctcttttatactctttgctttcctaatcttctttctagcatcgaggtgttctttccttgttatactactgtataaggtttctcctaaccttataagaagttcttctttaaactttttgaaggtgtatccttcgtaatagtctgcccattcccatgtaatactttgtgttcctttaaatactttactgaaccctgatatggttatggtgtatttgattgtcattggtagttccttcatcg

SEQ ID NO: 9 - DNA, 135880 bp, Unknown
  Description of Unknown: VREML137-2 complete genome sequence
tgctctcttatactcttatgcctgattgcttttcttattcatctatctatctatttacctttatactctcttataagggcttatactagttttccttataatttatctatctatatactagaacggcttaggtgggcttatacgagcttataggggtattgtaacggtagttactcttatacctgattgctcttatactcttatatagaattgtccttaattttcagactattctataaagtgtcctatttaagattttctatttccttatatactatatactatatatttaagtattattatatagtattatatattatagtattatatataagagaggagaaaaggaggaataggacattttgagaattagggggctagatgttaggtagctagtcaggtataaggaagaatagtagttattatctatatagttctgtttaaggggctttatatagttactaggtaaattataagggaaaggcttataacgtcttatacgagcttataggtgtgtttatatggctatggtagaattatacatatattaaaatataaagggatagtagcagaaagttattagattagtactatcaagaatagacaaggggctagatgcttgttatttaatcagattatgagttttatttgttaaaagtaagaatgctgttatataagggtttatataggttaggggtaaacatcttccctagggagattgttaacagtataaataaactagtgttatttaataaaaagtttcatcttttctattgacttattataagggctagtatagtataaggggtgtagaagagagctacaaataaaaaaaatagttacctattgacttttaacaataactaatatatgataagagaggaagttattactatgaacgaatatttaaaagacagagaaacagccctagtattagaacaaatggaagcatgcgaacggctgtctatcgaattaagcaaacaagaagtagaccaagtgactgtaacaagcattacacaaagaatagaacgaattagcgggcgtatcgcagaagttaaagcactagcacgctatactaaaaatagagagttataagaggaggggttaaaatgcaaaatgatgtttactatacaatacaagacagttacggctatgcagaatcttataatgaatcaggtttcttacatgaactaggtaacatgaaaattattgactatgcttatataacattagagggtacagaaaaaggggacactgcggaactagtgaaagtgcctatcttagagggctaccaatatccctatgattttttagtgattgatgaaataggtaaagaacactatatctattatgaagaaaaagaataaaaaaagtttcatcttttctattgacttttaacaacgcatagtgtaatataataagtgtaagagggagggaaacaagtggaaacagtggcggatattattaatgttttagaaattcttaagcaagacatagaatataaggaagggcgtataaaggaactagagggacaagggaaacaggaacaagtagagttactgaaagcagaaataaaaggaatgagtgaagttattcaggacatagaacaagcactataaaaaaagtttcatcttttctattgacaattaacaaactatattgtatactaggtttatcagataaagagagaggaagttattactatgacaatcgaacaagtgaaagactacggcaaagcatacggaaaagagctatcaactaaggaagttaaagaattttttgagaaacacaacgacatgccttcattaatggacttagcaaagttttgcggggcaatgaacgaggacggaacaaaaaattaaaaaaaagtttcatcttttctattgacaaataacaacgcatagtgtaatataataagtgtaagagggaaagggttaaacctaacaggaaaatgagtacttctttcttacacaatacatatcagataaagagagagaggaagttattactatgacgccagaactagcagaaatgaacctaactaaaaatgatagcccattttcatttattaatgaatcaggtgttttcattgaaccgattaagaacccgttttcttgtgaaggtacttatttacaagcttgtaaagacgtagcgggagagctagaagcaaataaagaggtagggaacgacatcgacaactatttaaaaatgcagaattggctaaataagttagcatatgaatatatttaaaaaagtttcatcttttctattgacaaataacaacagctagtatataataggtttataagataaagagaggaagttattactatgacagtccaagcattggaagcagttaaacgtattatggagagttcacatctagtagttatcaaaattgaagcggaagttattgaagccgaggggtttggagacgaggaaaacacttattcagttagagcggtaggggtatcacaaagagggaaaaaatacggtgtgtcttatacagatttcccattaactgcacgaggtaaagaaagagctgaaaagctagccgaagagttaaacaattggtaaagagggggctaactatggttaacttactaatcactgataaagttattgacaaaaaacaaagaatagtgtaatatgtacttatagagagaaaggaagttattaatatgaataacaataaattaatcatatcataccaaaaaaattgggacgaaaacggcactgtatacacacaaacagtaaagataccaagtgagctactaaccatccttaatattaaaataaacaaggctatagaagaaaaagggcattctactattacagacaaatttaatcatgtatacatttcaccgttacaagatggcaaaaactataccacaaacacaacaagtaaactaatcagacaagaactagggaacttatggatagacactaccagatacttatcagacagaaacacgattatagaattttattaaaaaaaactattgacaaataacgacaactagtataatataataagtgtaagagaaagggaggaattaaaacatgttagtaagcaaagacgaatttattaaacaaatggaaaacaaaagtaaattagtaggtaaacgattgaagctagctatccactcaaacaagacacattgcacgggaacggtagtagggcaatcagaaaactatatcatctttcagccagataacacattaatgacaatgaaattctattatggcgcttatcatattttagaaagactataaaaaagtttaaataaaattattgacaaaaaacaaagaatagtgtaatatgtacttatagagagaaaggaagttattaatatgaaaaacatcatcatcaaacaacttaaagacggttacaaagaaattttagaacgtaggaataacggttggacaaatgaggaactaaacagctatacggcaggcgttagcaatacactattcgagcttataaacgacttacaagacaatggtgttatcagtgaagaggaagccgaagaaatcgaagaagtattttcaaacactatcgatatattaaatttttaaataaagttattgacaaataacaaagaatagtgtaatatagaattatagagagggagggaaacctccctactacataaataaataaaaacgggggctactaacatgacaaactttgaaaaagaactattttctaaaatcttaaaaggtaacattattcacgagattgcgggaaaagaaaatgaaatgctagacggctacattacagaagaagagtttaatgagttcaaatctatgctaaacttattagacgtggcggggaacatctttacagaagcttatacaagtggctactttaaatcaagtaaaacagatacagttatagaggctaaacacgttaaatttttaggaagtgaagagattgaaaccattaaaacaatggcagtattacaagcacttgtaaaatttaaataaagttattgacaaataacaacaaatagtgtaatatagtaaatgtaagagggagggaaacctccctaacatacaaatagagaggaagttattactatgacagagtgggcaaacatgaataaagaagaggtattagaattacttaatgattggtttggtgttagtgattataatacagttatggaagaagcagaagagatgaaacaagtcacctttacaggtagcacaaaccaacctttattaggtggtaacaatgacttaatcggtttacctcaattctttaaaggtaacgaagcagactcggaattcccaacttatgaagaattactagaggaactagagaaagatacatggaatcttgaagcagaagataatacttataactacagtggctttttagaacgtgatatggactttaaggttatccaagcagaaaatacagacacgactattgcattctttgccattcatacgggggtagatgtgagagcgggctactcaaaagcaatcccagttgtctttgaaacttattacgattgccaagagttcctaggtaactacttttatagtcaaggctactacgcttttaagcacgataacaaagaatacacaatcagtttagatgtttcggctacctcggaatatgtacgaatttatataactgataataataacaacgagttacaactagactacgaacaagaaacttgtatggacttagacaaagagagcgtagcagaatacctaactagccaaggaattgagtttaaagacttgaaacctgcattataacatataaggcactagggagcttatacaatagagctacaagcttcctagtgtaattataaggtaaacagctataaacgcttatacgagagaatagggggctttaaaatgaagtttaaacgagcaattgaggaattgaaagagaaagagggaatcaccttagaaccagaatataacggggtatatacagttaagggctactattctaacttagaggtattacattgtagcgactacgatgaagaatataataacgaggaactagaggactgccatttacatgaacttgtattcaggtatgagggagagcaagcatataagagcggatattatgaactactagaattattaaattaatctattgacaagttccctataatatgatagagggataagaaaggataaaacagattgggataggttagggcttgacaagttccctatgatgtgataatatgataattttatgagtgtcccctccccgtggttttttgaccgtactttgggggtggggctatttggctaccccgaccctagggtacatattttttctagtaaaattatttttcccaaattttgatagtcaacataatacttaattacagtattcaacaccccatggtacacacccccgtataccccaagtataagtccccgaaatagtccccgattaagtacccgaaatagtaagggtataagaagaccccaccccatggtaaaaagaagaccaaaaataagaggaactcgttgccatggaacccgaaaaaatatactagtaaaattcgtgacctaaaaactagctcaatcaacaccctaagtagtcataaggtaacggacacaatggcaatacaagcaagggaactagggtcgttatccctacataataaaagaacaccctaactctaccactcgttataatgcacatgagtctggtagagttaaggtagttaattacttagtcaacaaccaaagacgtctccgtagattaaagagatttctatatagtggttgtactttccaattccgattactgtatagtttctgtactggtctagtatagtcatgtcatcacttacaatagtactaactgttaccctactatctggtaaatcggctgttactagtatctctgttccgttatacattaaaggcaatatatctttaagctttgcgttcatttagttgtcctcgtccttctcaagcatttgtataccggtaaatgcatgcacaggtagttcttcctcataagtgtactggttagccttaaacgttactctatagaagctctccatcccacagccccacatatcaacatattcgatgctaacgcatggcatagccccttcttcacttccccagaagagccactcttctgtacaatactctaccttacctgtgtggatacttctaactgctacatatggtttattcatttagtcttcctcctgtttaatttcttctaagtcacaagggtgtacgtcttgctcaactggtcttaggctatagcgggagtcacctactactgtgtaaacaccatcatcgtatatatccactaattccactatcgtcccaatggcaaaaccatggtcataacgagtgtttccgatgactttaaattgtttaggtgttgtataaccgtctatataagcttgtgctaatacatactgattatcttcaccaatccatacagctagtttatcatctggtgcttcatcatacgggtcgaagtactcactagctaataaacttaacattgaatcgtatttctcaattgctcgtgcaacaaaatttggtacctctacttttgttcccatctgttcttcctcctattgaatcataatacatataaaaagtagtatcagcaaaacaatgccaacccacccagaagttacatacgcactgtaaaaaaacgtatgtaagatacgctactgctatgattgttaatactagtagtattgtgttaataagcttctctaaatcaatcactatgcaacctcctagacctcacaagtataggtctggttcttcttttattctttcccttattcatagccaaagaactttacatagttctctgcttctttttctaaatgtttgtctagctctcctacggtaagatgaatcccgcactcttcacaagtgtaggtattcttatcttcaccttctataaactgtccatcgcactcaaggtctatgcagtgcatcgtccaactagctacatcatctggtaaatgtcccattatgctaagcctcctatctctacttttaagtgaacaaaccgtttatccattgcaataatctgctcttctgtaaaggttgggatgtcttccttattgtttgtaaaatctacgctacctaccttgtcaatgtatacgtatttccagtcttctttgtctactgctacaataaggtagtatctatccccaccaattgcatatccgtttacccatgcctctgcgaatgtttcttcgttttccttttcctcagctaaccaactacgtacagagtaaggcgcatcgctaccattattgattacatctatgagggtatgtccctctttcttgcactttttaatgtagtcggcaacgtgtttagggattgtagtctcagcaactaaacctaactcatctagttcagtaataacatcaatagctactgccatagctacatcgaagcccacagcatactcaggactgagtgtacccattgagcgggcacgagaagcaagctcttctctaattttatctgcaaattctctgttatccatctatagctcctccaatttctttagtatgatgttacgttcagtttttaggaagacaatattatctttgatactgccttctgcaatagtatcctttttgttcttaacaacacctaactgctctttccaatcttcaactgcttcttgatattggcgtagttgtcttattagctcttctcgactctctctttgttcaatatcaattctgacatggctagggtcttcccaacatacgtaagttactgtatactgcattagtagctctactttgttccatatcggctttaattcaatgaaaggagtccatgtaaaccgtatgcaggctctgtctcctagcgccaacttaacgtctgtttcgactgctagtacatctaatagttcttgtagcttcatataccttacctcctagtatattcctttggaaatctcagaacgtaactctttaagtactcgttccttttcttccttatatagtttgatggttgcctctaggtacaaggcacggcgttggttcatctcttcgtctgcttgcaccaattcttcttttactctacttaattctgtgtcataccagattatttcatctcttaagccttgtctacggtctactttttcctcatgctttcctgtgatgatgtagtgtttaccgttatctacactatactgcaatagttcctcattgtcaagcatattagttaaataccattgcaattgtgttaggttctcaaactgtcttacttcctttttgtttcccattttggttcctccgtttactcgtcttctacatcaccccaaccaaagctacagtaagaagagaatatatctctagcctcttcttctatttcctcgtctgtagcattgtcaggtacttctattgtttctacctcacttatgcctgcccaagttgtttcgatatacacatttattcttcgcatagtttgatacctaagaccacatagtcatctttctgtgcgtaatcggtaatataggttacttgagctttaacagactcaccagtaaatgtaccacaaatgtactcgttcaattctaagaagtcccctaccttgtagtctctatcatttttacgaatctcgaaagtcttcttaccttccttgacagcatagaagaaagtagaccgaattttcagatgatgaacaacttctacttcatagttccctaagtcaaaaatgatagtgtttggttcgttaccttctacactacgaggtagcttttggtagctaactgagattgtggtaggtactccattttgtttgccatagaagactgtttggtgttctgtataatctgctgaatgggtagctacgtttctagcgttgtatttaacaagtctttctttctcttcttttgcttgttctagcccttttactttcttagagacctttacatctccatctacgaccacttgcactagataaagagtttcttctttgtctacacctttcttcttctctagccagtactctgcgaacaagtcttggttgtctggtttagccataagttctactaagtggtctggtacgttccatagggcattcatcaaagagtttactgcataacctccatcagggtgtagaatgcatttgtctgcccaatcagtgacttctttagatagtttgttttccatagttaataacgtcctctcatgattttaatcttccaatgttcattattactgaacactcgttctacctcatttaatgattgcgtttccttaatcatttcttttagctttctatctgaattgatgttaccaaaccttttcaagaatcgttgtttgaaatgttcgtggtctgtatagtcgaacgagaacttatgttctttaccaaataacttatcttctttaagtttaatatctacgtatgagtacgtatcctccattattttcttctccatagtgtcccctctaagtcgtctaatacattttccaacgtagtgatagctccttgtaaataacctagctcatgatgtgagtaacggttccccgtacctctctctattaacttattagctctagtaattttacgttcaacttgtcggttatattgtttctttagtttgtctatctcttccttgcgatactcttcctgttcaattttacctattgtgtttattagtttacatagaccctcaccagtagtcccataaccgtatactagagcggtttcttggaggttgtgggtagctattccttttgagtgaaacagttttttcttgtcaaggttgaagatgatataggcaggctcccctattaagtagtccattgcacttgcatcgaacacctctaaatcggtatgtctcttcacagttgataacacgtcattaataatactttcgtctaactcattaataaataggatatgtcttctaattctcatgataaccctccttagacccagtataattttctaccttggtgtgggtaaaatgtttctagtttacttgatgtaatacggtgacctacgattgcattttggctagcagatactacttcataaatagcatatcccccaaattcattagcctctttaataaattctttttcttctgcgatactgaaacgttcatttacaattcttacttctttcatagctttccctcctgttattttcttttaaacacacgcatgtaactatgataagcaactgcccctattacagcagttactgtaaaacgattagaccatgcaattagttgaaaagtgcctgttatcatgtagattaagtctaataaaatagctgtgtatagcatagtagtaaacaccctacctaccattcctgaattaatctcataatttgctatggtaatgatgtttaatgcgactagttgaaatataaatgtagtaaacatagctccctccttatagggtataataaaaaccttacttacaagtatattatactagctagtaaggtttttgtcaacagttattttctagttatatttagtaatttgggatgacccaaatagtggtcgcacgcacacctttatggttaccagttactaacgcaaaattaaagtcactgattgagttttgcagtagctgtctaagtttatcattaaggtcttttagcgtttcttcactgattggtacttcatagtcaagctcccctatttcaaccacaaagttgtttgctctaatgtgcataaagtacgagtcattacgtttaacatggactacttcttttgcgtggaaactttgcatgataagactagcaatatcactattatgtcttcctacaataaatttatccacataaatccctttttctgttaataatctttcaaaatatcccatttaagtacacctcgttattcataatattcttcgtaaaactcttctaactcttcctttagtaactctccataacaaaatccacatagccctaactctatatggaaatctccgtctacctcttcaaggcttaacccacacagtccacattctaacattcttctccctccatgtattcaaagtaaacaccgttatgctcaaaagcaaatctaggtttaggtaacccaccattacatgaagcatgttctggatgtttatagaaatagtaatcttctgcacctgtagggctgattgctactactcgtttattcttcaactcttccggtagctctactccttctggtaaattaaggttgtagttgcttataggctctaacccataggcagaactatagacaaggaactttgtataagtaattactttaaggtagccaacagctctaagttcttgtagtgagcttcttcgttctggtagctctttgtacacaacaagtgcactgtatattgtagatagcttaccgttagttagcgcatactccattgatacaatctcattgttagctaagaacgcttctagctcactagctagtccactacgtgtgatacattcaaatatctttactttattcatcatacttcctccatatactctcttctgggcgcaccaaaaccacaatcagggtctggttcactaaaagtgataacatccattttatctttacaagctacgtggaaagctttaatacctgattgtatctcattactcaaaggaagagtaagaacataatcattgtatttctttagtaagactgtgtaaagaatagtggactccatactatcaaagttgtcgcacttttccatatacgtgtcatctaattggcaagagtctaactcatctctagcttccattaagtctaaacagaatgacttaatttcttcctcttcaattgtcttgtagacctcttctagtacttctctttcgggagttcctttactaatatctaaatctgagggataaatatatacaacacccccactaggggttgctcttctcgtcccatacatataggagtcctctaattcaaactctgagatataaatctctttagggctattcttaccgtcacctcttctaaaactatagttccctacaataccgccaaattcttcatagtgacctgtagcttccccaattaattttccgtgtctatagtgctgtaacgtacaaaactctccctcattaattggggtgttacatccggggcatatatacccaaaactcatcgttaatcattcctccttataaattatagtaagccgaagccctatacaaaactgcgtatcagtataaatctttttaaataaataatcagtaccttcttaactattactatatagaacagtagtaccatgaacagataacatatagtcttctgcataagtctttaaatcagtagggcatttaaacgtgaaagagttccctctcataaccccacatttggggagtagttcactaggagcattcacgaaccaatccacacacttaggtggataacctagtacgcaccctatagtatacctgctacttccactcgcttcgattagctttttgtatagattaatagggtgctttgtccgagctactaggtaatcggtgcgcataatgggatagaggaagtgtggggtgtttaccctacctaaatcccttttatctatgatgattacatcacgtagtcctaggttaaatgctgtggtttcttccattattaaataatcactccttattctatcattatacccttattataccctactataaggtatcgaggtcaactaaactatgagaaaaatttaataattcccccaataattactaaaataaagtagatagttgcaataagtgcataaaacttatagacaactgttataaatattagaaatagtaggttaaacgcactgaaatctccatattttcgtaggctattctcttttactacaaccgcaattaaagcaagtagcataataacaacaaaagctaacacaaagatacctataatcataagtggatgttgggcaaaagcatcccatatattaataatctcactcatactagaactctaagcctctataaaattcggtttcggcttcggtttcgggtacgggtacctccaagattgagtcaatcttttcttcaatgtgtttaataatctcttcttgctctttgattgtctctctataagactgtctttgtttatttagcttagcatattgttgtaactcatcgggtgttaaatcttctaattttcttttcatgactattctcctatcttgatttcttgaacattttcgatatttccaaattgtgggtgatgctctaagttatgtcctagccacgaatagatgctctcttctaattctcgtacctcttcttcggataactcatctgtcacactgtagtctcccatagactccccatattctgaatacagttgttcgtctatgttctctagcaagttatcaacgtttactccaattactgcttggtagaattgccctacataaaacttagaggttccttgtcttggtaaagcaccaaaaatgtcttctacgtgcatatctagcccattaacataatcttttccttgattaattgcttcaattgctaacttacctgccttgactgcttcttctaatgttgtaaatgattcgtaagctttccagtctaaacagtctttctctaatgatagtaaatattctctatcttccatctctattcccctcacatagttaagataattgttctatcgctgtaatctaaatgtagtccttcaaactctgagtagtggtcgtgtggatttactggttcccctaccataacaaaatcctctaaggggattccttggtcttttagctctagtaattcgtctaataaatcttgtgctgtcaaattattcatgccatgtagtatcctttctctttagcttcttcccactcatctacagaaaacaaacgctcattccgagacagagagccataacagtttactgttaagtctaccatcaagaagtccttaccgtattgttttgtccaactctctgtatatggtgttactgagtgcacttctttaatatactgctctaacatattcattttacgtgcccctttcttggcttgaattttcgtgtctgtgttcggttgtttctacttacttctttgtatctacgaatacctagtgccttagactctggacgagaacgtcctatctgtcttacatataagtctaatgcttcttttactttattatcgtacatcttccctaattctcggaaatactcaaactcacctaaatacacatggggcatacgccattcagctagggtagcctctactattgttcgtttgtttaaatcataattatagatatatagaaatactatataagtacctgtcatcaaagaatagcttgtcctaatttcacttagtgctacactgtctcttaatgatactaaatagtcattccactttttcttacgttcttctgctaaagtttctatgaagtgatttacctctttttcgtctctcactatttattacctccttgttatctatgtctatatattagcacctactttgacatatgtcaatacttttattcaaaaaaaaagaacctagcaattttacttgcgtaggctctcttgtttatatgtgtgaagtaggttaccttcttcgtctattacaatagcgtttaactgtcctccgtaagcacaggcaccatcaatgaagatacttctgtctcctatgaacacatcgtagctgttttcttttcttaaattaatcgtaggggtgtgccccataataattgttttacttgtattattcttttgcatacccattggtctacaccaaatcatttcatctttagtagctgttttccattcaggttgtcggtaaataggaatgcctgcatgtacacacaggaggtctcctagctcatagtagggctctaaaagacccaataggttaattatgtctgccttagctaagatggctctacgggcttctaaggcgcttgtaggcgcatccttcaatttgagcaaactcttaactgtttctgcccctccattgtacatccacattccgtacatctcgtgcaagtcctcatagtctgcttctctgactaatgggaaagttaggaagtctaataacatctggtcatggttccctaacaaagcagttccaccatcaagaatatgtttatagacaaaccctagtacctctgctgattgggctcctctatctatatagtcccctaataggactagttcttcttcatcagggttccagttgttatttaataagctaataagctcatcatagcaaccgtggatgtccgatacgataaatgcttttctcattaggttaaccacccttgcagtaggttagcaattacacctgctagtcctataattaacatatttacaactatagttacaatgataagtcctatatatttatatttacgtttagctttgtctttagacataacagtatctacttttttccgtaactctttatttgcatcttttgcataccattctaataagaagaacaatagtagaaaggtaacagcatacccttgggtggtaaaccctacctctaaattaattgttccacttgtgattatttgaatcaatgtctgtacctgattaactaaaagaagggcactatttccgaagaatactgctccaattgacatgcatactacatctgaatggtagtcgcatactcgaatatatgaccgtgtaccttttactattaatactaacacagtgaacatctgtattaatagacatgctattgtaaagaataaattgtacggttgaaccataaaattaaacacctctctcaaatttagtaaagaacgcatagtaagagaaccgttccgttatctcacgtccttcatgtataaatgtaaactctacgtatttattttttaaaggaataccctgtcgtttctcccacggtagtactctaggaaagtcataatagactcttgtagggaatacttctttcatgggtagccttgaatatttaggtttcactgtgtaacgctgtcctataatgtggtcgtagattggtttcattcgataataccatggatgttatatgttcgttgtgacttattgaaagctacttgcttctcactaattctggttaacgcatcttctagcaacagtggtttaccaaacttatggttacccaactcaggagagtcaatacctacgttcaacaagttaggttctggtcttactgcatcatgaatatgtccatgtaagttaactcggttaccacgttctccgataactaatgggtaatgggtcatatgaacaagcttgtgcattctttttaagataagtcctacttcctcccagaatacccgtccctctaatgatgtgttagataagattgctctctttaaaggtgcgttatcgtggtttcccttaattagccatatagtgccgtttaaacgctctaacacgttaatgacactatcgggcttagcacctaacgaaaggtctcctaggtggtatacagtgtctgtaggacgtactgtctcgttccactctctgattaagtattcatgcatgtcgtctacgtctttgaatcgtttacgtgcttcgataaatgagttctctccacacatgtttctatgaaataaatgtaaatctgatattacatattctctccccatacttgctcctccttagtgtgttgcaaaccatacgaatacagctagttgtagatagtgtactgtttggtcgataattagttgtgtcttttgattaggtactgtttttaagaaccatgcactttgtgcttttaaatagtccatgataaaatgtggaacccataagcatactacaattagcccaagttttactggtgttcctaagaacaatgtagttgcgacaataatatacgtccagatgttcacatggataaatagtacgtataggctcgtttgtttccctttggcgatatagtcactttgtaaagcgtagtcccctactgcgtgtgccattacaatgatagctaaataataaaagtaactcagcaacaatagtcctcctctttgtaaggataggtgcatgtatcacactcaaatccgtattcgttaggtgcattttctataatgtccccaccacattctgggcaaacaaaaatttgcatggtataaacctctctttctatttatattataagagtaacatgtgaataaattattgtcaagaaaaaaagtagtgatttctcactactcctctaaatctttagatttcgcaccctcaaaatactctaaccctaggcggatttccattacaacaagcagtgtggcatcaaagtagtctaatggttcacctaatatagctacattaattgttgtagtaattgctaagacgaagaatacaatccctgaccaccatctaattctctgactaaagttcattcttttctaacccctcttctacttcctctctgttatccgatgcaatctgtgttagacgttttaaataaccttctaactgtaatttatctaccttgtcatgtttcttaacgtcttcctcaattgtttctagtgaagctaacagctcatctaaacctgacatggcatctaacaggctaccctctaattttctgtttctgatgtttgcatgatacagctccttagctaccttatctttgtctacctttgcagtctttaactgatgtagtaggtctagctcttttgttgttctggcaatctctaagtctaactcagcaatccctaataggtcattcattataagtcctcctcgtattctcttacctcttttatgattttcagtacttcttctgcggtacctgcagtgctgtagtctgcatagttctccgatggcttaatgatagctactgagtaggtcttatcttctacatagatgtgcccaaacccatttagagagtgcattacggtcactccccaaccattagagaatacagcattgaacaccatttgggtatcgtttgcccatacctcattttccatcgttaataccatagaagtttcttacaatgttttctacacgttccataccttctaagtagctacgcttctcaggtgagatatagttcttgtaataaggaacttccttctctttctctacctcttcggtagtacgttcaatcagtttaacaagttttacttcgttctcttgctgagattgaattatatctaacagttcatttttcgagcatttacttaacggtttacttccatagtcgataattgtcatccgagtcccctcctgtatattctttgtagtctctatgtgtgtcatgtccacactttgtacaaaaccctgcttgttcaatatcgatagaagaggaacctgtttgtacaatatatgtctcataagtatggtcgcacgtttcctcttctgcttcgtctatcttctctaaacgaatagcttctccttctgctacttcatggttaaaaagtagtactgccgtattaatagggtcatatacttctgggtggacggcttcattcatcttaaagctatttccgctaaattcattgaaagcatctagccattcctgactgttctcataagatacaattctgtaattcatacgaaagctcctctcgtgttttcttaaataaccagtaccgttcatcaatttcttttatttctgcctctgttaggtagaaatcttttaagttggctatggtatcttgactcaatggctcgtttctaggcagtatgcttactgctaactgcccgtccttgcgtaatagtaacccgtagtctctctcctgtttctcaggcattaatacatagtacttaggtaagctagcagtatctgctactgcttgaatataagtgtctgtatttgcgaaaaaccatttgctgaactctgagttagggtactcacatgcatgtctctgcccttccaagataatttgtaacttatccataagctgttctcgttgtttatcaataaactcttttacctgttttggtacttctacctcattattcatagtttgtctcctttgttatactttgtcaatagtgatatacacatacttgccctctaactgcttaacaatatctagtatgtcatgaccgcctagcttaaatgtgtttgtctcaaacccttcgatagtaaaggaagaccaaccgtaccaaccttcttcaaagtccaagacccccatagatttaagtactatatttttagtgatgtcttctaatgaagtgcgttctacagcagagaaaatctgaatctctgcgttatcaagatgatacttagaagaaatgcctccatcgtactcctcttctgttgtagtgtcctcagcccctaacgcatacattgcattacaaataagtgtgttcagagctctatgactatgtttatactcaatttcttttactttttcttttattaagtaaggttcgtttgtttctgcaccggggctattatcaatagttacccaaccttttaatatttgtttacgcatagtgattacctccatctattactgcgaatgatactttaactggtacaacatctattatagcgtatttacctttttgtgctaacatcctagctagggtgtctttcctacttactgcggattccttcatagtgtaagcctgtgcatgggaggggtttgacgaccatgaattgagttttaaccctgctgtataatataggtagaccccatgctcttcgtcatactttcggataacaaattgagtatccatctacgtcatcctctcattagcatagcccagtgctgttatcagtaagtctaagttttcttttgtcaggattactgtttgttcagttacacagtctggtctaaatacctctactgtacgatttactacagtaatatctacagtatcttccgctgtctggcttaccttaataaactgtttggaaaactcccctagattagcaccttctatcataagctccatttgtttatagcctcctctcgggaaagtccatgaaagttgtggaaagtacgctcctgtagttcgtctaccacatccggtagcgtattaacctcttctaaccttaatgagatagttgaagatacacctttataaaagcactcaacgtctacttctattatatcataaggtagctccattatttctatattaaactcatagggggtatcttgtgttaatggttcatctaacagccatgtctcacagtagttaataggcatacctactagtaaactgtttaagctgtctaattgttcagataagtatgcaagtcttatacgtttacggtcttcttccataggcattgaacaacctagcgtatcctctatttcgttaatttctttattaagcttggctattaataaaattattttataaaacatttttaaacctcctcctcttctaagtccacatattctccttcgtcaagccagttgaaaactagctctccatccccattctctgtttcccctaggtactcgtcaccaataaaggcacaatagttcgttgggtataatgttacacaagttttgtggtagtagtcattacgtacctgtacaacttcttcgtaggcttggaagtgctctccacattctttgcatgttaacagtttagttttcactagttatcctccttatttaaaacatattgagcaactgcactagcaacttccgcttcttcttttgaggtaagacctgccaacacttgatgtagctcatcgttaaaaccattttctataatactatgaaaaccgtcaattatggttaaccctgttctgtctaaaaagtttactaaccattctatcacagtaagctgaccttcgtttaattcattagtaatttctgtgtatacttcgtagttgtctaaagtaagtgggaatgtatccccattgttaattacttgaaacccatttttaggttctagctcatactccccataagttagtcgttcacctactccaagttttacgtatatatccctattttccttgtgtagctcgtctagctcactgttataccacttgctcgtttcaactttacttaatctcataggtcagccctccttgctgagttccttgatacgttgtttgatttctgcttctgttttctctagttgtcgcattttgtttttatgtcgagataactcatgttcctttgcagtttctgccattgctaataagttttctaagcttgctgtatttgccattagattgccacctcgtagttaaattttccgttatgtttgtagtttgctactttaatttctgatagtgaggaatcaaagaagtttgtgccctttttccatggtagaataagctctggtacttcttctgggattggtgcattcacctgttgttcaataagctctaagtgccgttcatagatgtgtgcgttatcactcgtccagtataatgtaccaacttctaaatctaaagtatttgccattgtcattaataaggcgtagtattgaatgacgttaaatggtaagcctaaacttacatcagaagaacgagccttcacatgtagacttactttaccctctgatacagaccagtgagttgtccatacacatggttccaaagacatctcgtctaagtcttctacattccatagggtagtcatgattctacgagaatgtggagtagttttaagttgttcaataattgcctctacctgatttagctttaagtacggttgatgcgttcctgctatcgacccgcctacttgaggtacaactttcggtacaagtgaacctgctttacggttcttagctaactctacgtcatcactatagacaggaataaaacgctccttgctagctagtgcatacccatatgctttaccaatagttccatcttcttgttcccattcgttccaaatagtaactcctcgttcttttaaccatgaaacttcattagacatttcttgccaaatccattgtagttctgttaaagcccatttaatacctacatgtttactacgcagtaaaggagcacccatatctggtgtaatcttaaagtgtactccttcaatgaatctagttgttgcaggcatgccgtcagcatatactgcacgagttccttctggtttctctgttactccatttttaataatttcgtttactaagtctttgtaaatatcatcgaatgataatgtcatgtgttatcttcccctttcttaactcatatatagaataccattgtgtatgtcttttgtcaatagctaactacaaaaaaaatacgacacaccgaagtatgccgtactaacttgttaaattaatttgtctaagtctgcatagtcagcatccgttactggctccacttgacctagtaagtatccattacctacttgagaaaagaagtcatggttacttgttgttgtagaaataccattcattacaatagggttcacatctgcgcttgttgttgggaataacggattcattcctaagtttgctaacgccttgttcaagttgtactctaagaaagtgttaacgtcctgagtccacccaacaccgctatatagctcagcggtatacttggtttcattttcccataagtcaaaagctaggtcaagtaaccattgctctaactctttctgctcgtcttctgtcaatttgttaaaacctaattggtacttataaccaatatatgttccatgaactgactcgtcacgaattatcaatttgataatttctgcggtgttaaccatcttagcttcacctaaataccgtagaggtgtatagaaccctgagtaaaataggaagctctctagtagcacagaagcccctttcttctgtaatggtgagccatacttgtaaacttcattaattacctttgctttatattgtagacgtttgtttgtctccacccaatcgaatatctcatcaatctgtgaaggcgtattaaacgtgctaaaaatagtagagtaactcttagcatgaactgactccataaacattatattacttagaacagcctcttcatgttgagtagtagagtcatctagtattgattgaacccctgcctctgattggagagtgtctaacaaagttagtcctccgaatactttattgaataggtcttgttctactggtgtaagtttcttccagtcatttgtatcgttacctacaggtaccctagtgtccaaccagaattgctctgttagcttcttccatgttgcttggtcgattacatcttcaattttgttccagttaattcctttgtagttctctgtgttatccataacctaccccccttagattgtacagctttcacactctgctaccccaactgtgtttccgctgtcttccgtaaatgtacgtacatagtaaattgtcttaataccttttttccatgcgtagtgacgaagcaatgttaagtcacgtgtagaagtagcgccaccttctggcttccatggatatagcccttctggtaattcagagcgcatgaataaagttaaactcattccttggtcgatatgcttctgtgcttgagcataaacgttaattacatcaatcatgcttgtatcgtaagctgacttgtagtaaggaatagttttttcagataagcgtggtgcagggtaatatgtcttacctgttttaccatcctgtctttcttcaatcatagaaataattgggtgtagcgatgaagttgtttcattaacgtaggcaatacttccgttaggtgcaactgctaatctattttggtggtatagaccatctttaataatgttagtacgcaacgcttcccagtcttttacattaggtagttccaccccgttaaacacttctgctaatttaggagatatttctggatttagtgttggtacatattcatcaaagtaagaaccatctgcatattttgagttctcaaagttgtaaaatgatacaccacgctctttagcaatcttgttacttgctactagggttgcatagttaattagttcaaataaagcatctgtcatttcgatggactctgctgaaccgtattctacttcattatctgcaaaccacgcatgaagtcccatagcacctaagccaatagtgtgggctttatcattaccattcttaatagttggcacttccttaatgtttgacacatctgtgatataagttaatgcacgtaccattgtttcgatagaagctactacatcgtttgatgtttctagtaggttagggatattaatagaacctaaattacaactgatgtctgtccctagttcttcatatacttgctcatcattaagtttagaaggtgtttgtacttgaaggatttctgagcacaaattactcatgttaatagttccatcaataggatttgctttgttaactgtgcttacattcattacatatggataccctgactcctgttgtaaacgacttatttcttcctctaagtcccttgcatccatcactttactacgaatgcgtgggttttgaatcatgttatcatactctttgtcaatgtctacataagaaaactcaactccgtattcctcagctacatcataaggagaaaataagtggataacttctcctgcttctactagttcgtagaatttatcaggtattacaacacctagtgataatgtcttaatttgcttagacgactcagcattttctttgcgtgtagataagaaatccataatatctgcatgaaatacatttaggtagactgctccggcaccttgacgttgccctagttggtttgcatacctaaagctatcttctaacattttcatgacagggacaacaccgctaccagcaccttcgatacccttaattgggtctcctagtgctcttaggtttgagaggtttagcccgactcctccgccttttttagatagttgtagagaactgttaatagcacgtgcgatagaactcatagaatcttcaatctggataaggaaacaacttacatattcacctctacgtaaacgacctgcattggcaaatgtaggtgttgccggttggtatctacgatgaattaattcatccgcaattttcattgccaagtcctcatccccgttacccatgactaatgcattaaatgctacacggtcttcataacgttctaaataacgttctccatcatctgtcttaagagcatactgcttgtagaatcgatatgctcccataaacgtttcaaatctaaacttcttgttatatacaaacttaaacagttttttaataaattccattgagtacttatcaatagttactgctcggtcaatatagccttctctgattaggtaattcatcttctcttctagtgagtagaagaatacagtatttttattaacatgttctaagaagtaggctctcactgcttctttatctttatctagctgaatcttaccatctttggggatgtttaactcattgtttaaaccgatataagtattcatggctacacctcaaattctttagctagctctttaacaatgtctggtctcacaccgctaaatgtatagtcttctcctgcctctacataaggtaaagaagagatacctttatcttgtaaataagctaaagctgtttcatcttgtgtcacgtttttttcctcaaacgggatatttttaccgtccaacatttttttaaggaacatacattgtccacacatatcttttgaataaactgttacttttgtcatttagtcctatctcctatacaatcttttatagtgttacttatctagtatagcacaccttacctctttttgtcaatgtgctcgacttacaaaaaaaaaggaacctgacttaaataggctcccctaagaactcttcttgtgtatcttttttacttaaaacagaatctgctagtaaaactgagtagttcttacccgtctctacttgcagtctattaaacactcgttgatactcttctggtgaattagtagagtctaacaaaaattttgcgtttaataaagataaaacctctagtagttcacccttagaccctgatagctgaactaccgttttaccatttccgtctatataagctcctattttacttttagctaccacattttacacctctttaactttcaaataccgtttgaccttgtaagtcttattaacttttttaagaacatttggatatttactttgtaacatcttacggtctactgtgttacgagtgctctctgggatgattacaaaaataccgaactccgactcgactgtattcatgcctagctcatccatgtcattaataatagactcacgtagttcctccatttcagcgttaagactatttgcaatatcacgcaatttcatatagtttcttaagtccttctctaaaagctccttacccttactcatacctattacctccatatgtttatcatatttgatactatgatattatcataaggtgacaggtatgtcaagtgtagttgcatattaaaaaaaattacctacggctacataggtaattcttgtccattatcttcttcaaatagcttttccataggaaccccataataattagctactttacgtctatttactagtttagcttctttatagccattctcccagtaagatattgtagaccagtggagccccaatgctttccccaactttcttagtgagtcccctttttcttctcggtatctcttaagtattttgggaatagcttctttattctcttcttccggtaacatacaaatccccctaaactactgactatgcaaatttgccaataaacttaatgcgaccttttgttgctccgttaattccacgtacatagtcctctaactcgttacgagcaccaatacgtgtaggttgtgttgcttctacagtaacatctttagtaactgttacatcacgtttcttagttactactttaccgctctttaatttcttctcgtattcttcctcacgagttgttgttaattcaataataccataaaaattcttcataacatattctcctaactattttttattaataaacctatggagagtgatggagtcgcaccacccgagcctaagcaacagatttacagtctgccccgctactacttacggaataaccctccttggataaccaaccagataggtacctgacacacggacagcacctgtgtctctctgttactggctgattaattgtgtatttcgcaccacctaatataactatcgatataggaacaagctatactaaatgtgactaggttttaactgtaacttcctatgatagctcctattactaatcatatttatatacagttaaactacacataactaaaccggttaccttggttcgcatattaagaggcgcaggcaaccaatggacattgcaggtctcgaacctgcgaccgttcggttatgagccgaatgctctgaccaactgagctaaacgtccagaaagagtagtgtctctttattagttcctaccaaaaactaatgacatatgctactctcgtgatgattataaacttatcaaatcggaaagacaggacttgaacctgcgacatcagactcccaaagcctgcactctaccaagctgagctactttccgagttacctgtttaatttggtcttttaaactactacacacaggtaaagataaaccctctgccaaggggagactatcaccgaaccgtatataagtttcgatgggtagtagtcatattaagttacattacacattattaggaagtttacctatgcagaaggtgggactcgaacccacacgtccactacagaccgatgtttctaagacaccgttgtctaccaattccatcacttctgcatgtgtaccactaaaggttacctcgattacaggcataactcttttctggtagggagccatatcttacatggattgtaagaaacctaacctttgtggcactctttaactactaagggtttctgaattaacgttatccctagaccgtaccttagcagtaacactggtgagaggatttgaacccctcttaccggttaatcttcgacaagcgctatggaagattagcggtgcattaaccatatctatgctacccagtacactactattttacgcaatccgtatagtagtagttatcacggactcaacccgattcagggaagtgtcagtctgcatcctttgggggaactatctaactacttgaacattagatattcccagactgctcacttacattgttatttaatgtcacatgtcttatgacaaccgtactcaaaagtttcaagggcttttaccccactatccaccgacagtatgctcggtaacgtctttctaataataagtacttgttaaacttagggaaggttaacaagtatgtgcacatagcccgaatgctactccctaaagtagcctgtgcgggctaacgtagatggagggatttgaacccccgaccgtccgcttagaaggcggatgctctatcctgctgagctacacctacaacatgtgattatggtaagccttggcgatgacctccataatcactcatagataagttcggttatctaaaaatttagctaagttgtctccttcttagctatgagttaataataccatgctctgttgattatgtcaagcactttttaaaacttttttaaaataaatttctatacctcattaatatcggtgactgtgcgtaaggagagaacgtagatttcactgactacttaattagcgttaagctaacgaggtatagaaagaaaactacattgaccgagtcttattatgcagtcttagtagttgttaacaacgtttaatattaaatgtcccatatagtaaaccaccccgaaacatcggggtggggctgtggtaagccaaacccatgggtatgctccatcctgcctccgtagagtacagtctcaattttagttagttaaaggagttgctagttaacgtttagctgacttatcatactacgtgaactactagcaaataatagttttcatttaaggctaacaatcggtagaggatttgaacccctaatgttggttttggagaccaaagtgttaccagttacactaaccgattatgtaaaaatactttttttatatctctacatgtatagaatatagtaaacaggttacttaagtggatgtttagagagaatacctgtttatgcttattattagtagcctgcttctcagtgatagcgcctcttatgttatatataatatttgtaaagtttagtcaatgtgagaagtaggctaaaatgcaggtacgggaatcgaacccgttttttccttcctgcttaataagatagctagctagagtaggttagttagagttagaaatggagaaaagaaagaattttatatgagctaactatcttatcttgttaataggtaagagcttcttaaaaactcaaaagacaatacaataggggcttttactcctgcttaaccctattcgtctcattcggtaacatactcagaaaggctgaaccaacgagagctactcgatgatttctttctgctttttaatgtatggtctagcactgtggctaacaactttcacttgaacattcagctttttcttctttattgtgcaggttggatttcatatcctactgtgccataatttaaggctgactataagctactcataccaagttcttttgttaaactcgtatttctacgattctcgtcaaaagtctgctttgaattttcttaggtttgcgctctttttcaaggagaacctaactaagattctttccaacaaggacgtctatttcagaccccaaaaggcttgtaccttgagcccgtccatagagtttccacacagtgctttgcgtattagtagcttttactactaggttttacagttacctgtatcatacccaaaagtcctaaccagtatcccaactagagccttttatcgacttatcccacactgtcctagctagttgctcaaactatctgcactaggttcctgttgtattgtcttttcagtttttaagaattatcgattctacttatcttcttagtaataatagtgtctagggttgagagatttcctagacactattaagcagggttgataataccactgctagggaagataggtaatatttagtaagtggttgggaagtcctcttacatattaatcgatttgatacatagatttctctatgtaaatcacctatcaggacttgcacctgactagctagctatactggctaagtgtctttgtacactaggtggtgttaccctgtaactatattataacacataacgagataaaatatttttaaaaaacatgttttataataaaaagttacagagaaacagttaataacaacgaatacactctttattaaagactaagcagagtgccgttccctgcttgtcccttagctatatttaaataataacatagttatctgaatgtgtcaataacttttttaaaaaaagaatatataaattactaaactgattggtgttaagccattaatgactaaaatgtcctatttaacttttttgttttccttatatactaatatataatattaataactatataagtatattaagatatattaagatatataaattataatataagaaagacaaaaatagtgaataggacattttactagtagtatctctaaatataacaataacatgtacatctgatacagttagttattcaaactatctcctacatattactctgacttagctagtgtctacaaggtatctagccaaaatgtcctatttaacttttttgttttccttatatactaatatataatattaataactatataagtatatataactaataatataataactaatatataatataagagagacaaaaatcatgaataggacattttaggtatttagtcaatcagtcaataaaaaaagagagcatagagctctcctatggttgttcaaagtaactgttaatatttcttattcttatctctttgtcttcctctgtctcatcttctggtgctgtatacagtttagtgatagcttctggtacctttttcatgacagtttttgcaataggtacatgataagcattaataaactccacgtctgtatttctatcagcaactttatgggcaggtaacataggtagttccttaccttttaaagccccattaacaattgacatagcatcaacaattgtgcccccgaatcttctagggaaaactaggtagctaacatctgcaatcttaacttctacaactttttcaaattctgggtagttcattattccttctcctttcaaattgtggtataatagatatataaccattataccacaatcctttttaatacaaattacttaaatgagctaaacacgtaagtaaccactgcacctagcacaatcataaatacattttccacaatgtcccttttgtggtcgaattctttatcatttactccttccagtgcatctatcgtctcctcaagtttagtaatctggtaggtcaggtgcgcatacttctcctcgtgaacagcaagtcttttatcaaggctattaacaatttccttaagctcattaactgcattaccaagcgccgtgttttcttgcctgatacctttttcagttaattcaccatgttggagcttgtcttctaacctctgtaatcttagaacaaggtcgtttacttgataatcgttcattatatgctcctccctattgtttatgttgctctgtccctcaatcagatttaaaccacagacagatgataattcctataatagagccaactgtatatacaatagggaagtataccccattgaaaaacagatagatactactaacacttatacaatataggagtaaagtgtacttgtaagaggctattggactaaattctgcatgtaattttctatactgtattgcacgagtgacataataggacattaaataaactagtatctgtatgactaatacacatactagtgctaattcatacatgatactgtttctcctccttcctagagctattattaatatagtacaccagactagtagtaagcaggtgtgctaaattaatagtagaggctacaaaatacagacgggggagtggtaaaaatgaaaggtgcacgtcactttttaaagaagttgctatttatcaccatctctttatcaattatgatactcttgtgtaaagttattttaaactactttggagtggaaaaatatctaagattgcacacgataataggtggagggttccttaccctaattgctacaagactattcgacaggtatagtcggaagagatacaatgagcaggtgaatgctaaactaagagaagctctacacgatttaaaagaaataaaatcaataattaacagatagtaacaaaggaggtgctcctagaatgacagacaaagagaaggttaaagagaaaagaaagaatattctatccaaatcagtcaaaacaactgttatcaaaaaaggagacaagagggtgtcaagctctacaagaatatgtgctgtttgtggcaagccactatcaagcctagtattacgcacaggagcttccataacaacagctaaccatatgagctgtttaatatccggttttgtaagacttaacatatgtgaggatatacggtcttgctacgcatactccaataagaaagggggaacacaataaaatgagtatggcagacagacttaaagataatgcggaacagaaaaagttagaaagaacacctgaacagaaactacgagacacctttaacgtagcctctacaactctaattaaccaatttatggctaaggtaactgcaggagctgtcgagatagacgatgtaggagaccttactagactttttcaaatttatactcagattaacaacataaatgatggaatgcaagaaggtacaggttcactgcctgcattaacttctacacaaaagaatattatatcagcaacaatccctactgaaacagttgaagtgaacggggaagaagaggagattttgtcactagatgaacttgcagaattaagcgatgcacagttagaaaaagccttgttggacagagaaatacaaatgaatagagagaacgaggcgacctttcaatgacaaacactaaagcacaacatatagctaaaatggcaagggaaatgtacggaacagataagataacgacagagcaactagcttacgttatggatatgctgacaccttctacttacttgctaagaaaccattcagtacgtaaccacgcaataacatttattatatcaggtagggacatggctaaggcacaagcacacagaccatggcaaccacagataataaacgaccaacatagagacaaggcaataatcaaatcgagacagctagggctgtcagagatgggtgttggttctatgctacagtttgcagacacacatagttatgatgctgttaaatgtctttacacattccctaaactaattggggcttaggtcagtaatgacctttgaaaaattctgttaaacgggcaaagctgaaagtacacaaaaataaccaaccttactcatttgtaaggaggaataagctgataagagagcctaagtccttaaaggataggggtaatcccgtgctaaatcaagcgtaagcttgtaaatgcctaacgactaaaatttatagtttacttaaccaagatagtaagctataataagaaaacttgcaatataaactctgatattaaaaataaggaggtgaaccattgactaagaggaaaactaatgaagaatacttaaaagaagtaaatgaattaactaaaggaaccttagaactaaagggtgagtattttggttgtgatacacatacggaagttttttgcacgaagcataaactaacaatttcagtgagacctacaagcataattagaggtaaaaaagtatgccctaaatgtaatgcagagtaccttagtatgtgccagagaaaagaccaaaagttatttgagaaacaactagcacacaaacataatggtcgaataatctcgttagaaccatatgtaaatacacatacgaaaataaaatttaaatgcacagcttgctgtagtgagttcaagtctgagccaaactcagtattgagaacaagtggttgcccttggtgcaaacagtctaaaggagagctacttatagcagatgtactaactaaattaggaattgattttgaagcacagaaaactttcccagattgtactttcaaaagagagttgccatatgacttttatattgaggagtacagaatgctgatagagtttgatggtgaacagcactacaaacctattgagttttttggaggaaaaatcgcatttgaataccaaaaaataagagataacataaaaaacgattttgctaagaaaaatggttttaccttattaagaatacgaggcaatatgtcagaggattgcgttcgtaaaaagatagaaaacatattgcaagaagtaacgcagaagccctatcagatagggtatgatatagtctagtccgactgctaagagcagtgttaaagtatagtgaaaactacggtagattcgacaaatgaccaaatgacgaaattcgtacaaaccagactagacccagtattacaaaatggttattacagcaccatagtagacccagaagtagattcattgaaagctaaaaaaatcagaaatagcttcttatacttccgttctagttcaaaacccggggcagttgagggtgtcgatattgactatctttctatggatgagtatgatagggttccggcattagcagaagcatccgctttggagtcaatgtcatcctctccctacaagatagttaacagatggagtacacctagtgcccctgatatgggcatacatggtctattcaaaagttcagaccaacaccactatttacataagtgtgacaaatgtaactactacaatgaaatgagctacgatgactacgtaccagaagcccctatagagagcagaggtaatattctttgtgtaaaccctaaaggggtagacgtaatagctaagacagttgtagatggctctttccaattcgtatgtaaaaagtgtggagaacctcttgaccgttggtacaatggagtttgggttccgaaatacccagaaagaactaaaagtggtaatggtactaggggctatatgatttcacagatgaacgctgtgtgggtaaccgcagaccaattaaaaacaaaagaagtacaatcattatctaaacaagccttctacaactatacactggggtacccatacgcagacttgaagttaactgttaacgacaacgatgtagatagtaacaagagaccttatttactagaatcagcaaaagacagaggagattacaaattcatatctgttggtattgactggggaaatcgtcactgggtgtccgtccatggtgtcaaagctaatggtacagtagacttgattaaacttttctctgtaggcaaatcaaacccactagaccctaatgcgattgacgttgacattcagtctattaagttacaacttgcaccattcaacccagatataattgtagccgatgtaggtgactctggggataaagtagcaaaacttatgcaaatatatggtaaagaacgtgtatttgggtgtgtatacccttctacacctaaatccacaggtaatgttgtacctacgtggaacacaaatggtaacaaggtatccgcagataaactaatgcaaaacaaacgatatattagtaaaatgaaagaaggggagattggattctaccgtaaagacgatgctgaactattactctttaaagaacactggaaaaacgttgttatccgtgatatagaagacgataaaacagcaactggatttagacaaataatcggtagaaaaggtgacgaccacttctcccaagctagtgtatattcaatgttgggctatgaatacctaatgaacgtatttacaggagttaacgattacggatttgactcagattgggtatcaactcaactatcaccaacaaaacctgatattcttacacagtttgtatagttaaactaagtactctataaagcttactgctagtagagtacttttttaacatgttttaaacaattttatgttataatagtattagttaggaggcgtgttatggaagagagtacgaaaaaatatgcaagagtaagtaaaaaattcttagaagacttagcaggtgaacccctaagttatgactatattattaaaaataaagaaagactagacacacaatttgagcatataatcaagatgtatgggtttagcagtatgtacgaactttacctatacgcagacagtaacgacagcgaactgctagttaaaggtggacagaaagacttgtctaagcttaaaccagttaaacgaaaagtagtcagaaatgggaaagtgatgacaacaaccatctatgaggataactcttctggctcagataaaggtaatgaactagactctaaacgcaaggaaactaaggtaaaaactcctattttggcagtagatttagagaaagagtcatatggagaagatgaggaagagttaaaccctaaaaagatagctaagttacaagcacaaactaagagcttaggtagcggttttagcacttcgtgttcaagttacctactattaaacgaaaatggtgagactagaggagctataggatttactgtgaaaggtaagtacttagagctaacctttagcatagctgatagtaaagtcagtggtttacagtacctagcattttctcaattactactaagagcgtggaacagtaatttaggtgctagggtagctgaaacaaaagatgaggcattacttgctatgtacaacatgtacggtcttactaaaggaaatggctactattctgtttcatcaagtactcttaatagtattttgggagagaaataggaaattagtacctcgctagcaatagtactagtgtttgcgactattgtttatgtggtttacaatttagtagtagcaaaaatggtaggtgagcttttggagctaagaacattagcaaaagaggggctaactagcaaagcagaaactataacaaaagaaattactcaaatattggaaggggaacaattaaaaatgagcaaagaagttattaaaaacacacgaacattaaatgaattactggaggagcgtgcaacagaggaagcttataatacttttgtagagaagttagggagcattgtaagagatttatatgagaactaccaattcttacagcaaaaccctgctaaagatgactttacatctggacactttttaggatttcaggttattcgtgaagagtatcctgtagaatatgaaaacctattccgtatggcagtagactctaatttagatgaagtcgagattagtaaaagattcgtgaaggctgtcaaagaaggtaaggtaatccctttagggactgctgttattgacgaaattcaaacaggctgtagctcaatattacaagctcaagtagttcgggtaaacattgtttttggtacaccagagtacatggctaagcaagaggaagaacgtaacaagagattggaagaaattgaaaaagagaaagcagaacaattagaagtcctaaaagccaaagatagtatactaaatactttgcgattgactgaaatggtggcaaatgagctagtggacgaagtggcggaaaagcatgaattaactgaactagttaccaagtttagagaagggttgaaagctcacagtggaattaagtaactcatttggtaaggcactattagctaatttaaaatcgttagatgagaaaatgaaggcgttggacggctctactggtaacgagagtcaggtaatgattcctatccctaattatcttattaaacagaaagaccctgctgtatcaaattttttacgttgtataggagctattagcaatatcaaagaattagggttacctgttagtttagaacaaggtgctgaaattaagctcaacaacggagaggtaagtagaattatagaatgtgtttttacatattctactaatactgacgtgttcaagatagaagagtttctatttaaaaatttataataacaactagagggtaaatttctttgtgctatattaactatgcatgagaaagagccctctttttcgtgactaaaaaaaggaggtttaacagatggcaggagaagtatttagtggcttgactacaagtgtaaaccctaacccaatgaatgcaggtagccgtaacggtatccctattgaccgtattattctacaccataatgcaacaacaaataaagatgttgctatgaacacgtggctattaggtggtggtgcaggtacgtctgcccattatgaagtcacaccaacagaaattatagggtgtgtcggtgagcagtattcagcataccatgccggaggtaccggtggtatagacgttcctaagattgctaaccctaaccaacgttcaattggtattgaaaatgtaaactcgtcaggagcacctaactggtctatagaccctaaaaccgttacaaactgcgctcgcttagtagcagacatttgtaaacgttatggcatcccatgtgaccgacaacacgtattagggcacaatgaagtgaccgcaacagcatgtccgggcggtatgaatgtagatgaagttgtacgtcaagcacagcaattcatgacaggtagctcagttgcgccaaacaaaccagaaccaagtaagcctacaccaagtaagccgagtgaaaacaacaaaaataaaaaaggagtggcaactatgtattgtttatacgaaagaccaattaactcaaaaacaggggagctagaatggaacggtgatgcatggactgttatgttctgcaatggtgttaactgccgtagagtatctcacccagacgaaatgaaagtaattgaagacatttatagaaaaaataatggtggaaacattcctttctatagtcaaaaagagtggaacaagaacgctccatggtacaacagactagaaacagtatgtccagtgattggcattactaaaaaaagctaacaaaacttagaccatcttcgggtggtctttttttataccttttgtaataattgtaacaatatgtaagacccctgtaactacattctacctgttctgtaacactaagatgttatattagttcttgtaaacaacaaaaaaaacttttaaggagaattatattttgaagaaaattaagatggcaggtttaacattattaggtttagcattattagtaggactaggtacagggacagatgcaagtgctagagaaattaaagagaatggaaacacatattgggaagtagaggcaggagatacgttctcagaaattgcacacaagtacaatatcgactttgctgatatggttaaggctaatgacaagtcagtagtagacccaaatattatttttgtgggagacaagttgttgttacctttggatggtaaggtattacaagataatacaccagtagttaacgaagttcccgtattggaagaagaatttgtagaagaagcacccgtagcagttaacgaagcacctgtagtagttaatgaggttcctgtaacaccagaagtagctacacctcaagaagtagcaccagtatccggtaactcagccaaagagtggattgcacaacgtgagtctaatggctcttacgatgcaacaaacggtcagtatattggtcgttaccaattaactaacacttatttaaatggtgattattcacctgaaaaccaagaacgtgtagcggatgcatatgtagctgaacgttatggttcatgggagaacgcacaatcattctggttggctaatggttggtactaaacatataaatagttaataacaaaagagacctttttatagggtctctttttttatgctatattaatatacagtaaacagtgataaaaaatgattatagtacattatatggtataatactagtataggttattaaccaataaggaggtagacatggggtatatacaagatgagacatggcaactagttaagcaggtagccaaacagaatggctttatcgggaactgggtgtacatcattcactcttactatgaatttggaggagaccatgtacagattcacacaaccatcgataatgtaaactatagaattttgagattgttagatgataaaagagttttattagtaaataaagagaacgagcttactgtattaaacttcgatgttgtaaagaatagcaggaagacgttcttttatagtgagatggagcagaaggagataacattgccagaaggaacaagtgtaaatggtaaaacaaaattaaaaatttatatgtaaagtaggtgtattaattgccaaagtggttagatagagtactaggcgtagataaacagcaagaatcaataagtagtacagaagtatacaaaatgaagctaagggaggtatctgtaggacaaacagcagacccttatagcatggaaacagttgaaaaaggaatgaacggtaaagacactgcatatatgcaacctatgataggtgagatgacagtaaatccgggttttaagcagaagccatctattaggaactcacaagacttacataaagttcttaagaagtttggtaataatattatactgaatgcaattatcaatacaagagcaaaccaagtatctatgtattgtaagcccgcacgtaactctgagacaggggtagggtacgaaataagattaaaagaaatagaggcagagcctacaagtcatgatgtagcaaacattaaacgtattgagtcttttttagaaaacactgctgtattttctgaccaaaatagagacaactttactgccttttgtaaaaaacttgtaagagctacttatatgtacgaccaagtaaattttgagaaggtgtttgataaagatggtaacttcataaaatttgacacagtagaccctacaacgatattcttagcaacaaacggtgaaggtaaggtcatccaaaaaggggaacgatttgtccaagttctggataatagggtggtagctaagttcaacgagcgtgagttagcattcgcagtacgtaacccgagagcagacatcgaagtaggtcagtatggttacccagaattagaaattgcgttgaagcagtttattgcccatgaaaatacagaggtatttaacgatagattcttctcacatggaggaactaccagaggtatcttacacgtaaaaacagggcaacagcagtctcaacaagcactagacattttccgtagagagtggagaagctcactagcggggataaatggctcatggcaaatccctgtagtttcagcagaagatgtcaaatttgttaatatgaccccatcagctaatgacatgcagtttgagaaatggttaaactatttaattaatgttatttctgcattatacggaattgaccctgctgagattaatttcccgaataacggaggagccacaggttctaagggaggctcacttaatgagggtaactcaaaagagaaaatgcaagcttcacaaaataaggggctacagcctttactaagatttattgaagacactgtaaatacttttattgtagctgaatttggtaataagtatcagtttcaattcaggggcggagacttaagtgcccaactagataaattaaaaataactgaacaagaaggcaagatatttagaactgttaatgaaattcgtcaagagaagggtttagagccaattaaaggcggagatgtgattcttaatggtgtacacattcaagcaattgggcaggctatccaagaagaacagctagcttatcaaaaacagcaagacaacctagctcgtttaatggaaatgtcaggtggactagaaaataacgcacaggaaaaagaagtagaagaagataaagcagaggaagttaccgatacagaagtgtcattccaagacaaacagcaaggtatcaacggaaagtctaaaaaagtaaatggaaaaatagacacaaatgtaggtaaggatgggcaacttaaatcagaggaaaacatgaactccactaaacagggtacagacagcttaaaaaaatagattagagagggggaatacccctttcttatctgtttatgttactaagtagtacctgttctgctatattaaatacaggaaaaacgtttaggtggtgagacataattggcaagcacggaaaaatacaatattttcgtacctattgatattgaaaattcaatcctaaagtctgagtcacaagacggaggggaatggtatgtacaggggtatgctacaacacctgacctcgacctacaaggggacatcatactaccacaaggaatagacatctcttatttcatttctaagggatggataaactatgagcataagaacgaagcagaatacattataggagcccctacagataactgctatgtggatattaataaaggtttatttgtagaagcaaaattaatgaaggaaaacaagcacgctcagtcaatgtggaaactagctaatgcaatacaaaaatcaggaataagacgtaatttaggattctcgattgagggagcagtagttagtaggaatgcaagagacaatagaattatcgaggcagtagttattcacaatgtagcgctaactactcacccggctaacccgcaagctacgtgggagacactagttaaatcatggacaacaggttatgaaagttcacctgaaacgcaagtagatggtggggcattgcgtagagaaatgttcaaacaagacattacgaatctaacatatgcagtccaaactataagtaatttatatggtaaaaaacctgatgaaaaggagtttattctccgagaagttgcaaaaagtattgaaatggacacttctgaaaaggagttaactaaatttatgttacaattaagtagaggggtatcttacaaggaagcctccgcttttatagaagaaagagaggggaacaaatagtggttaaaacaattaatgacgttatcaaagattttgacaataaactaaataatgcagtcacagaaacagaagagggagacattacgaagtctaccgaaaccgaggaaggtgcagaagaaactactgcattagatgaagaggtggctgaggtagttggaacagaagaagacactacagaagacactacagaagacactgcagaagacagggttacagatacagaggaagctacagaggaagaagttacagaagaacctgaatctgtagagaaatcaagtaaagaggacgaagaggacaaggaggaagaagaagaggaagacaaagaaaagaaaaaagataaagaaaagaaaaaagacgaagaagacaaagaagaggacgaagaagacgaagaagttaaaaagtccgaagatgtcgaagaacctacagaagaggtagaaagcctaattaagtcggcagatttactaggggctatagaaatggtatttaaaaacttacatgatgttattaaaacaaatgctgagttaaacgataagttagacaaactttctcaagagttccaagaagctaaagctgttaaagaagaagtagcaaaatcagctaacgtagacacagagctcaaaaaaggtgttgaagacattgaaggtaaagcagttggatacctaaataaatcaatagatgttgaagagcctgtagaagctacagaagctacagaagatactacagaagtagttgtagacggtgaaacggctgtagaacctgaaaaaactttctacgaacagattcaagaaattcgtacagacttcatagaaacatataaacgtgtatcacaatcaggtgtagcatcacgtggtgaaattgaagaagctcgtcatttatggacaggtcttgtcgatgacggtagcgaaaagactagcaaagacttagaaaaagttaaatcatttatcaataaatttaaataattttactatatagtgaactattttaagaacaactgctatattaataagcagaaagaacaaagacctaacattccctcctgaacctccacagggttaggtcttcctttgagaggaatacaaggaaaggtgataaacaaaaaatgacagaaaacaaaaatacagaacgccaattaacttccgttcaagaggaagtaattaaaggttttacaacaggatatggtattacaccagatacacaaactgatgccgccgctttaagacgagagttcttagacgaccaaatcactatgttaacatgggcagaaggagacttatcattctatcgtgatattacaaaacgtcctgcaacatcaactgtagctaaatatgacacttatctatcacatggacgtgtaggacatactcgtttcacacgtgaaatcggagtagctcctgtatcagaccctaacttacgtcaaaaaacagttaacatgaaatatgtttctgatactaaaaacatgagtattgcaacaggcttagttaacaacattgaagacccaatgcgtatcttgactgacgatgctatctcagttgttgctaaaacaattgaatgggcttctttctacggagatgcagatttatctgaaaacccagaacaaggttcaggtttagagtttgacggtttaattaaattaatcgatgagcacaacgtattagatgctagaggtactagcctttcagaagcgttactaaatcaggcggcggtaatcatcggtaaaggttatggtactccaactgatgcttatatgcctattggtgtccaagctgactttgttaaccaacaactagaccgccaataccaattagtaagcgacaacggacaagacgtaacaatgggcttcaacgttaaaggatttaactcagctcgtggtttaatcaaattacatggttctactgtaatggaattagaacaaatcttagacgaacaccaaatgcaattaccaaatgctccacaaagagcaaccgtaaaagcaactgtagaagcaggtaaaggtaaattccgtgatgaagatttagtagctcctgtagaatataaagtagtagttgtatctgatgaagcagaatctgcaccatctgatgtagcaactgcaactatcgatgacaaaactaaacaagttaaattagaaattacagttaacaacatgtaccaagcacgtcctcaatacgtagctatctaccgtaaaggtttagaaacaggcttattctatcaaatcgctagagtacctgctaaattagctaattcaggtgttatcactttcattgatactaacgaagaaatccctgaaacagcagacgtgttcgttggtgagttaactccatcagtagttcacttgtttgaattattaccaatgatgcgcttaccattagcacaaattaatgcttctgtaacattcgcagttttatggtatggagctttagcattacgtgcacctaaaaaatgggctcgcattaagaacgttaaatacatcccaacagcaaatgtctttaacgaacgctagacctaactaggaaagcaaaattgaataaacaatggaataggggacggttaaggctgttccctatttttattataaaaagtaaacggaggaacaattaaatgttgaaatcaaaaatattagtgaataaagaagtagcaacttcctttggagttatcaaatttaacgagttaggtgagtgtgcagaacttactgtagaacaacaagagcatttaggtacaaagataccttacatccagtatataccagaagcacctaaaaaagaaccaaaagaatcaaaagaaccgaaagaaacagaatctaagaaagcacctgctaagaaggcacctgctaagaaagcgacagctaaagataaaaaagataaagaataggaggtagctatatgtacccagattacggttatgaagagcagggggctagctctaatcagtacgaaccatatgcacatgggaaccctaagcatatagacttagaagacgtagacaaaattactcctgcggactacggttggactcctgctacacttaaagagtacatgtttggtgtggatgttgtaaacccagagacgggggaaccactaggtgacacgttctatgaacacatcattgatacttccattgctaaggcggaaaagcggttagatgttgctatcttaccaagagttattagaggggagcatcatgacttccaccaaccagactttaactcgtatatgtacacacatgtgtttaaacgtcctataattcaagcagaaaagctacagcttgagattaatggtagaggggtttacagataccctgcaaactggtggaaagtctattcactagcagggcacattcaaatgtacccaacagctatgatgcagacaggtacacaatttggctatgatatggctttctctgggtatccccaactagcaggtatgccacctacaagtggacatgtggatgccccacaaatgattcatattgactacgtagcaggtatgctacctagaaaaaatagaggatacaataatgactgggaatgtccggctgacttagaacagttagtcataaaatatgctataaaagagatattccaacaatggggaagacttatcattggtgcaggtatcgcaagtaagagcttaacagtagatggtattagtgaaagtatccaaactactcagtccgcaatgtatggtggtgcttccgccgatattagacagattgatgaagatattgaggggctagagaaatctttaatgtcgtactttggtatcaacttaggtattatttaaggaggtattgacatatgggagaaagacctgtgagatttggtagtgggggaacaacaaacaacccaagtaagcaattaaataccagtagaatagaatttgaaacaaaaggtatggcaaccttcattcaaaatagggggatagatgttaaatgggagcgggcatggttgtgtacgtgcagaaatcctatgacactttccccaaaatctgactgtaacatctgtaaagggagaggtattgcctatcaacctgcggtaaaagaacgtatgatgatacagagtcaagagaaaggtatctcaaatcaagacttaggtcttattgattcaggtactgcaataggtacaacagaattagattcgagaataacatttagagatagaataactgtaccagatgtagaaatatatcaaagttttatttttaatgtaaccgaacgtagagttaacaacggagtattccttagctatgatgttaaaagattagaagatgtgtatggtgttaatggagagctactagtagatggggtagactttaccatggactataaaacaaatacattgtaccctgataaaaaacttataggtactaatatgtctattaacatggcagtgacattgagatatattgttatagatttactaaaagaaagtcgataccaatatacaaccttcgcagttaaagaaactcaatttgagaacttacctagaaagctgttattgaagcgtgaggacatatttatagacagtgagcctttctcactagatataaacacagaagcccgtatcaaggagctagggaaggctaatggaacccctgacgaagaggacaaagaaaaaggtatgctagaccctaaacgtaagtcaaatgagcaagggggattctttggaggtaagctaaatggctagaagaagaggagaaagacctgaactatttagagatgcgaaggcaattttaggtaacttgtcaagagcagttgtagatgaggtactatcagatgcccaaaatgtcgcattaggtgagggtgcctctgtacaacgtatgccaaactaccttattgtaacagaatcaagaatggctaagagcggtgttatagacttaaaaccgttcttcgctaaatctagtaagaagaagtacaataaaaaaggggaatggtacttatacattcctattaaaatgaaaacaagaggaatgtcaagaaggttatacgatgatttgaggtcggtaccaactggaacaaagcctataactgtcaaaacagattttctttatgatagaaggaagcaaagcccttccgttcctagcattaactataaacctaaatccaccaatgtgactatactaccaaacaaatggggagacggtaaacgaaatacatacgttgcattcagaactgttaatgcaaactcccccgctaacagttggataataaacagagataaagtatctagtgatactatgagtaagacgatgttagctaatattgataggctcatgaaatggaagttaaaaaatataggaggctagaacatgattccaagtttagacacttacttgtataaagaatttgaagaaagactacacgtagtattgacagagtgctatattatagatgaagctttaaagggtattgataaagaagctttaactgcttttaagaatacttactgttcaatagatggtaagccacctcttaaagaagttgagatgtcatactcgtttccacaagaaaaattagattcatgtgctcgttttgtagtgactctcggaaccagtgaagaagaacaaaaatctattggaggcatccaaggtggttatgatttccgtgaaggagacataattaaagaggttgtaacaataagtagggaagacgacaagttagtattaggaacatcacagcctattgctagctatatgaacagccctagtattagtttttctaagagtgacaacttcgtaatcgatgatggcaaagcaacttttgactatgctagcaatgagcacttagagggtatggaaatccctataacctacattgcaagagcaagtaaggaggatatagcaggtgtctataaaggttaccaatctaatgatagtgtaaacatcgtaggcataagtaacaatatggatactgcaagatgtttagatgcacttgctaggctcatcttaataactatgcgtgatagtttagatgaaaaaacaggatacatgttgcaaaccttgaatttcggggatatgcaggtagtaatcgagaacggagaaaccttagtatttgggagaccatgtacaattggttatcgagtaacaaattctgttggatttgacttacaaaatcaaattcgagaaataattacaaaaaggaggatgaaatcctaatggctaacgaggcaccaaaaaaagcaagcaaacaagaagtaaaaaaggaacaagttcggacagttaagggatatgttcacgtagatacgttcttagattatgcaggagcgctctatgggttaaataaatatcaattagcgggtttcagagcgttcatgattggtaaggaataccaatatgaagataaagattttgtcccatttttagagaagtatattggaaaggaagtttaataaatggctgtagaacaattcccaagaaaaagagtatcacgtccacacactgaaatcaatgtagacacaacaggtatcggtggggcatctagtagttctgataaaacgttaatgttaattggttctgcgaaaggcggaaaaccagaaacagtttatcgtttccgtaactatcaacaagctaaacaaacattacgtggtggagatttgttagatgcaattgagctagcgtggaacgcatctgatgttaatacagcatcagcaggagacattttagtagtacgtgtagaagatgctaagaatgcaactttgacaaaaggaggactaacttttgcttcaactatttatggagcagatgcaaacgaaatccaagtagctttagaagaaaatagtttaacagaaactaaaagattgacagtagcttttaataaagatggctaccgtaaaacttttgacaacttaggtaagattttctctatccaatacaaaggttcagaagcacaagcttcctttactgttgagcaggatagtgtaactaaaaaagctaacaagttagtattaaaaaccggaactgatgcagaaagtatgaacgaagtaatgagttttgacttaggtcaaggtgtatatgctgaaactaacgttttagtaagtgccattaatggactccctgactgggaagctaaactgttcccactaggtgacaagaacttacctactgcaacacttgaagctgttaaagatgctgacgttaaagctaaagcagtttatgttgaagctttagcaggagacttaattaaacagttagaatacaatgactacattacagtaactgctgatttttcaaaacctcctgtggagttcagcttaactaacttagcaggcggtgcagatggaacagtacctgagtcatgggcagataagttcccattactagctaacgaaggtggttactatttagtaccattaacagacaaacaagctattcatgcagaggctttagcatttgttaaagaccgttctgacaatggagacccaatgcgtgttatcgtaggtggaggctctaacgaaacagcagaagaaagcattgcacgtgcaactaacttacgtgaccctagagcatcactagtaggattctctggtactcgtaaaatggatgacggtcgtttgcttaaactccctgcttacatgatggcatcacaagtagccggtatcgcaagtggtttagagattggagaagctatcacgtttaaacattttatcgtgacttcactagaccgtgtgtttgaaagtagccaactagacatgttaaatgaaagtggcgtaatcagcgtagagttcgttcgtaaccgtacaattactgcattccgtatcgtacaagatgttactacttacaacgataagacagacccagttaagaatgaaatgtctgttggtgaagctaacgacttcttagtatctgaattgaagattgaactagacaatacgttcatcggaactaaaatcgtagatactagcgcaagcttaatcaaaaacttcattcaatcattcttagatggcaaaaaacgtgctcgtgagattcaagattacacaccggaagaagtacaagtagttcttgaaggtgatgtagcttcaatcagtatgacagtaatgcctattcgtagcttgaataaagtaacagtacaattagtttacaaacaacaaattttaacagcataaggtaatagggggagacttccccctttcctacctaattaatcaaacataggagtgatatatacatggcaagcgtagggaatcaaacagtccatacaggtaacacagtttaccttatgattggtaataagattatcggtcgtgcacaatcagcatcaggtgaacgtcaatatggtacgcaaggtatctatgaaatcggtagtattatgccacaagaacacgtatacttaaaatatgaaggaacaattactttagaacgtatgcgtatgaagaaagaagacttagcaagtttaggtattacagcattaggagaagacatcttacaacgtgatattattgacatcgttatgatggataacctaactaaagaaatcgtagtagcttaccgtggctgttcagcaatctcttactcagagtcctttacagcaaatgaagttacatcagaaagtactcaattcacttacctaacatcagcaaaagtaaaataatgattgtagaagtaagcctcattaactggggtttacttttttttaataattattgacttaatactaacactatagtaaaatatagataatttttgaagtttaggaggacaacctatgaaatatccatatttagtagaattgtacgcaaaacacgtagtaagagataacagttacatcaacaacgtcccagaagttattaaagatgacgttgagaagcgtgtaaaagaaatggaagagcaagtagacttagtataataactaagtctattttttttgaatatattaaagactaatactagatagtatggtataataaagatagtgctatattaatttatgaacaacacaggaggagtaagtaaaatgacagaaaatagcgaaacagtaattccacaagtgacagctacacgtaaacaattaattgaaaaaattgaacgtggagagaatttgacagacgaggaaattgcagtattaaaatatcacaatgatgcagaagagcgtaaacaactcgaccgaattatacccggtgttaataacgtattcagcaagcattacaacttagaagagtacgggctagaatttgatattaaaatcaaggcaccaaatattattgaaaacggtaaaatccaagcaagacgtgaagcctatttagaaggtatgggactagcagtaagtaactttgtatttcagtgttatcaaacactagcaaccatccgtgtgtgcggtattgaagtccctgatattttagctaaagacgaagatatttacaatttgtatattttaggtgtaattgggaaggattttggtgaatggctaaactcctttcgatactaaaatacaagagtttggcggaataaaaggtcttgttcgtaacaattatagcagaaacttatgggctataatggacaagtttaaagtgttacctagcgaccctgcatggcaagcaataacacatgaacaggtagagtggattttatacaacatggaacgagatgcagaggagcaggcacgcagagctaaaggaatgaaacttgatagtgagttccaagactttgacgaatcatggtataccaccccacatgaagagttcactccattacgtgacggacacgatgaggaagatattgctcgtaagcttaacgaaatcacaacagaggacgatatggcaaggcttaaagctagatgggaagctagccaagaagttgatgcaattagggcagaaggtggaacgaccattgaagaagataccatcaatgaacttatcagtaacaatgtacagaaggctatcgaagaagctagacgtatagagaagcatggtggtaacaaatggcaagataagcaccctatcgaactagaagaagaacggaaaaacctagagttcaaagaacagttaagtaaagatgatatacaagatgcagtaaatctgtttaaccaaggagtagaaccaacatcgttagacgatgaatttgagatttaatttcgttagggtagggggcattcctctaccctaaaattgtaaaggaagtgtggaaatgagtaataactatcgtttttatgttgaggcaatgacaggggatgctgttgcaaagttaaacgaagtagataagctgatggataagatagactcaaagagtgcaaaaggtactaagaatttctttcatactagccaaaaagatgtagacgatgcaatagaggatatgcaaaagctcattaaaattaaaaaagagctagatagaacatttgagtcacgtaagattaacgcagaaagcatgggggacatgacaggttacaaacgtgcagtctctgatgcagaagagcttacccgtaaatttaacaagacacaacaagagtttcaaaaacatgctagaatgaaagctaaccctaactacataaacgctagcactttaagagaacaaaaggcttttcgtgatggcttaacggaacaggagaaagcaatcagggatatagcaagggcgcaacaagaactaaatcgtgttaactcacgtgtaaaccacagaacaaaccaagctatctctacaggtagaatgacttttaaccagtcagaaagtttaaagcgtgatttaagatataaaaacgtttttgaagggctaggctctgagaataaaacaagacaaagtgaacttagaaacagataccgtagtagacaagaggaattagcgggtgtgcgttctgatacaagtttagacagacagacccgtaaaaatagagaaacagccatccaagcagaaatcagagaaatagaaaaagagattgaagcacgaaaacgtttagctgatacaattaaagaaactgtaggtaacatggagcgtaagcaaaataccatgaatgcatcagacgttaaagttgatgctgacagaaaaggttttaaaggtattatagctgaacgtgcgccatccattgctatggctactattggtagtgtagcgggcgcagtaggtggtttgtatgctaaaggggcaactgctaatgctcaaatgagagaaccttctatctctttaggacaacgtacaggaaacagtgattttagggcattacgtaaaagtgcacaagaaatgggactagagaaacaactaggatataaaggcggagacatgctacaattccaagaagatgctttgtctaacattgggtttactaaccaagaggacttagcaggtagcatgaaagctttagccgagggctcaagagcagttcctgtagacaaccaaacattaagtgactttatgaatagtcaaatgagaagcggtgctatcgatggaaaagaccaaattaagaatatccaagaagggttcttaggggctatccagaaatcaggaatggcaggacgtgaaaaggaacagctagaagcgttaaaaacacttagtgaacaaagttttactggtcgtaatggtagcaatgaagaacttaaacagcaaatggctatgttaactatgttgaatcaaacaggctcacgtgctgtacaaggggaacaaggcgcacagttgatgtctagtatctcagcaggcatccaaggcagtgtgtacaataataaggcatcattactactaggtaaaggaacacagttccaaggcttgtcaggtatgtatgacttaaaagcaatgcaagagcaaggtgcaacagcggagaatatgagtaagttaatcggtagtgtacagaaatcagttcccggtagtgagaagggacagaagtacgctttcggtgcaatgttacatgagaacttcggtacagatgctaaaaacgaccaaatcgatgcaatatgggatgcctatgcaaatggtaaactaaatgaagataacctaaataaaataatgagtggcaaccagtcagcaggtaaaggtaaatatgataaaaacctagaagactatgcaaactctaaagaagggacagccaaccgttcagaggcggtgacagagaaacaagcttcacaactaaacgataaaggtgacatcttacgagatattaactctaagttaggaggtatcccaccgggactgtatgctttaggtgcaggaatgggtgcgttagctctatctttagccacatctggtggtattggtggtattgcaagctcgattaaaaactggactaaaggaacgtttagtgcgggtgctacgactacagctagtggcggatttatgaaaactgctaaagaagcctttactgcgggtaagggaacaggcggatggttccaaggagctaagaatgtaggtggtgttgtcaaagactcagctatgggcgtaggggctaaagctatggaaggtgcccaaggtcttaaaggagcgggtctaggtagcaaagtagccggaggactaggtaaagcaggtaagtttttaggtaaggtagctactccattagccataggcgcttcattgttagatatagcaaccgcagaagataaaacaaaagcggtaggagagaatgcaggtgctattggtggcggtatcggtggtgctaaactaggagctatgataggtacgtttattgctcccggaattggtacggctatcggtggaggtattggtgctattgggggttcaatagcgggctctaaactaggtggaggtctcattgacggagtgcgtaagttctttggtggagacgaagcctatgcagagagcggagacatgtcagcaggacaagaagtaatgtcccaacaagaggctagctctagtggtaaagaagctagggacatggcaaataaacgtgttttagctgagaaagaaagaacggataacaactcggcagaagcgacaaacttagctatctactctaaattgttagatagagcacaacgtattctcaaccaagctaagaatcagaatggtatctttggtaactcaaacaaaggtgaaaaagattcttctgacgggatgggttcagatgcatctagcaaagattttggcggagattgggaaaaagctattagacaagcatctaaaaaaatgggtgtagatgtttctgatgaagaaatggatactatacttagactaattcaagcagagtctagtggtgacgagagcgcagtacaacaaataattgacgaaaacaattttaatggtaacggcggagctaaaggtttactacaatatgttcaaagtacttttgatgcatataaggtggacggtcacgacaacataatgagtggctacgaccaactgttagctttctttaataacagtaactggaaaggtgacttgaactcgtggaataaccgctaccagaatggaagtaccggatggggtcctactggtaataaaactagagcaatgggcggacatataactagccctgagtacgcattactaggtgaagtagcaggacaagatgagtacgttatcaatcctagtcagccaaccgccccacgtctattagcagaagctactagaaaaacagcgcaaaacttccgtatgccgggtaacggttctgggcatgactggggagcttccatatccaacatacgagcaggtgggcaaggaacaacacctacttcaatgaataacacaaatgaaatatcggtaaatgtcactgtgcaaggtggcggaaatagcgacaatatagctaaagaaattggtgataagtcagcaagtattatccaacaaatggcagataaaacatttgcagatttctttagtaaagagcaacgagtattctaagagggcgtaactgccctctttatctaggaggttcaaaatggcagtagaattaagatacccaaggtttgacgtgactttttttacagagacagaccaataccatatatcttatgatacacgagataagctatcaggaaacagaaatgcagatggtacaagaaaagcacaagtaagtaacaattttatgtctgagtctgttattagtttaacaacaaaaaatgcaatggaggacgacagtgcagtgttctcttttgtattagcaggagatgtttactgggatagagtactacaagctaatgatgcagtcgtattaagaatagaccctgacatcacttctgaaacaccaaataaccctatattacttgtaggtttagtctcagaaattagactagaaggggactacggggaaaactcaaaaatgtatcgtattacaggtcaatccttcgctaaagcactgatgcaatttgacttaggagttatccaagaagttagtgttgtactaaccgacttaggttggctacctgatgatgctcaagaaggcatcaagatgtctggtagtagtgctagccaaattgcggaaagtctaatgaaacgttttatacaatatatgaagtttaattttaacggtgagggaattgataagtttttagagtgggagttagatagttggacagaggcagagaggttgattgacggaacaccttacattaattatgaaggctccttaaaacaacttttggatgatataacagctaagccatttaatgaattattctttgatgcaacacccgaaggtaaatgtcgtatgattatgagacggactcctttcgataaagcagactgggagaagctagaaacatttttagtaacttctaaagacgtaatatcagagtccttagcaacaaatgatgtagaggcatattctatctataacattagtattaacaacttgtatggtacagactctatgatgttgggttctaagccacaagtgttccctgacttagtaaacaagtacggttataaaaaattagaagtaggcaacagatacctagagggggctataatagataaaagtagcgataataaagaggcggacacttcccctaaagcagaggaagcagataatgagggagtgacaggcaagcaactgtttgaaacagaatatgcgcttaccttaaactacttacagaactacccgaatgatgtcttacgagtaagaagaaacgaagtaagaacttctcttacacaaatagacaaacgtatcacagaaaataaagcagaccaactaatcgaccaatatgtagactaccaaagtttaacgaaagagaagttttctgagataacgggtattaaagaaagcaacatagacgagggtaacggaaaagacaaacctagctatgataaagtaaaaaaactattaaacagcttaagtaaggatttaggagtaaccactattaaggaaaacctaatgaacaagtttaacctaacaaataaccaagcgttgagtttagctagtgagtataaggcaagtggtaatttaggtaagcttaagtatgaagagataatggctaacaaccctagtgacagttccactgtaactggctcagatattaaatatgtatcagagtttactaaaagattagctaactggtactgtgagaatgcaaacttttatagcggagacattgttgtgaaaggaaaccctaagtatcgtttaggtaacagactatttgtacaagatgaacaaaatggtgagctatgggagttctatatagagtctgtagagcactctttctcatatagccaaggttaccaaacaacgttaggagtaactagaggactgcaaaatggaggtaacgataggtttacccatctatggggcaaatccgaagacttctctggtggtatgttgggagagaaagagcttcaagcgttactagacgaacaagcaaaagcaaacaaggagaacgagggctctagctcaggaggagatggagcaactggggggaaagagtatacagcgggagcaggaactcagctagcagtattcccattggatgtgattaacgttacccaaggagaaaatggacagttcagtcatatgggggcgctagcaattgacttttcagatggaactccacataaaccttattatgccccatttgactgtgaatgtgtttatacagattcttactcaggtgttgcatggcagtcgcagaagccagttaaatgtgttgatggtagtgttacttacgtaactttactatgcatccatgataacaactgggcaagcaataaagtaggggataagaaagctaaaggggaagttttagggcacacaggaacagcaggtcaagcaacaggagaccatgcgcattttgaggtatccaaaaacaaatggactggatggagtacaagtagtgcaggtgtttactatattcaaaatcctgcccacctatatgatgttttctctatcaaaaataacataacaggtaaaactgcaagtgtgcgtaatggtggaggatacaactggcgtagtattgactgggacgataaatcaggttctggttcaggtagcaagaagagcaataggagtaaaaggtcagtgagaatgttaaacgcaacacctcaagtagcagaggagccagttaaaaaagaaagcacacctcaaaagaaagccaaagttgtaaaagaaaaaccaaaaacttataaaactgtgtacggaagtaatgtagctaaagaagcaacgaaatgggctagagaacattctaaaacagaatcaatgtaccagtcagcatttaacttcgggaataataatggggaagacccatttgaaaaagaagagatagctactgatagtgcaggactagtctggtggagcttctaccatgcaggtgcagagttggcaggaggagctattggtgtaactacacgctcccttctatatgatagacagctagagacaattagtagtagaggtcaaaagaacgaatccatatttgatactatgctagtaggagacctagtatggtttaaccgaggaagccacgtaggaatctactgtggtggcggtaaatttgtggcttgtaacggcaaaggtacgatggagaacaaccctaaaactggtattgttgtagtagatatgacaaaaggatactggtgggataaattcgatggtacagtaaggagatataagtaaccctttatttacaagggttacttttttttgtttccacattgtgagtaattgtgctataatagttagtgaggacacataaaagaaaggatgactacattggcaggacgtagatttcagtcagcgctaggctcagaagttaaacgagtttataaagaagggcaacaaattaatacccttttactagcacaagtaattcaagtaaactataaatataatacagtagacctaataacacttcaacataaagaggtattccaaaactcctatgcaaatgagggtaaattctctgcaaggttgcctatggaatttggggggagaaatgccgtaggtaagtcttacggacaaataaaccctatctcagttggtacagttgttctagtagggtttgtaaactctgataaggacatgcctattgtaattagcgtttacaacaacaatgatgtaaacaagcaaattgcacgagcgccctttgctaatgcagacccaaaagatttagaattagcaggagatatgtaccagaaatttagcttgtacccatcattaacttatgaaaatgtagatggggacggtagtagagtagtcaccttttccggcaagagttttattatgtttgatacaaaaaacgcagagcaatcccctttgacagatgcaggggaagggtctcgttatgaggacttagaaacatcctattataataacggagatttaattgaacctatgaaaggtagagcacctaatgtgttattcaaacatcaaggtgtgctcgatgataataataaccctgacttgcataatttcatgattcatattaacccagatgggacgtacagaacttctatggttaacaaaaaagaagactggcgtacattatttgaaatgacacctgacggtaaagtacgtttacgtaaacaggactctattaacttaggtgaaggtatcaaatttggtgagttaggcataaatggtgaaggctttgtctatatgcgtaacggtgacatggacttagaggttagagaagatggtatttattcgcaaggagagaaattcaaagcggaagcagaccttacggaaattaacaataaactagacgggctaaatacagagattaagaataccaataaccagttaactattattgctagtgggttagaagagcaggatggtaagattaacaacatatctacagaaataaccattctagcaggtcaggtagaatctaaagttactaaagtagaagtgcaagatatgattgacgactcctttgtggatatgacggatgctattaaaaaagcacaggatgatgctgataaggcaaataaggtaattgctgatatggcaagtgacaatcggttaacacctagtgagaaacttgatttattgagggaatgggatgttgttaagaatgagtatcctagttatatagaacaagcggaaacatacgaagtcgatgacactgactacaaagctaagtatcattcactagagttgtttgtaacacccctattagaggatatggaggctactagcacggttgatgggggtatgttacgtagaacgttcaataactactacaccgcacgtatagcccttttaaactccattagtaaaaagttaagagatggagtaacagaagcaatcaagaaagcttcacaagcaactatagatgcttcaaacgctttagcagatgccacacaagctaagatagatgctgacaaagcaaatgctttaattagtgatattgctagtgataataaattgactcctagtgaaaagtcccaacttaaaaaagagtgggaagttatcttaaaagagtatcctataacaatcgcacaagcaagtaaatataatgtcaatacggatgagtacacagctaagtataacgcactcaaactacttgttactcctttatttgaaaacatgaatgaaacgagtgtagtagacggtgagactttaagaaacacattctccgactattacgcaagtaaaattagcttgcttaagctaatatcagatactgctaaggacaccttagatgattttaacggtaagattaatgttatggagacaagcattaaccaaacagcagaggctattactttactagctactcgtgtagaaaccgtggaaacggatgtaaaaactaatactgcacaaattaaggtacaagcagacctaattagtcaaaaggtaactgcaagtgaagtaaaaggtatagtagatgattctattaacaatatgtctattggtggttcaaacctttttgttataaaaactcaaacgactggtctattaaacgaaaatgacgggacggtagggacagcggttgacaattcagtggtctctgattacattaaggtagacaagaaaaaaccgtatattgcaaccttatatgggaatacaggaacaaatacaatcatcgttgcatggtataaagaggacagaacttttatatcaggaacagcagaggcagggcaaggtgattttagtagcaaatacacgtcccctgatgaagcagtttacgctagattgagttacaaaaaagctaactccgtaaatataaaatttgagattggtacaaaagccacagactatagtccttcttgggaagacttaaaaggagaccaaacagccttagaggagtacattaagagggtagaggaacaggctaagcaagcacaaaaagatgctgaaaatgctaagaatgatgctgagaatgctaaccaatctattgctgacatggcaaatgataacatgctaacgcctgcagataagaagcaaatatccttacaatgggaagaaataaagacagagtacccaataaatgttgaacaagcaactaagttcggagtgcctagtatccagtatacgacttcctataacgcattggagaactatttaaaacccttattagcagatatgacaacaacatctgtcatcgtaggttctactttaaagagcacgtttaacagctactatacacaacgaacgaacttgcttaatagaatcgcagatgtatctaagaatttagcagacaaagcccaagcagatgcagataagataaatgacaatctacaaaacatgggtgggtataactatgtagggttttcttctggggacaatatgttgcctagattgatgattaaaaatgttgggcattatgaagtaagtaaaacaacccctgaatttgtaaatgacttggtatccatcaaaggtaatgctacaagtgagccttttagctatacgctaggttcatctgataaagaggtagccggtggtggtttagcagactatcgcatgaaagaggtacagtcaggtcaatggctgaccgcttctgcaaatattcaagttataggtacaggctcggcaagactctctatctacacattagagggagacaattgggtgggttcaagtagtaccaccttgacaagtgaagacaacctaaaaagagttgtagctcaacgtaaggtgaccggtctaacagtaggggtactagtacgtatagaatctgccgatgaaaatgtaaaagaaattagatttggcaacacccaattagaagttggtattatccctaccccttggaaaaaatcagatattgacattcaagaggatataacaaatgtcataggtaactacgaaatgtttactgcgtgggctaacgacttacaaggtaaagacttcactaagaagaaagtagaaggaaagacctatgtctatattggaacttctatgaaggacagtgataactactcagactacctatggagactgactgacgaacacatagaaggtcagctaaatggtaaagaaggtgcgtggatttactctgcaacagagccttccaatccatcacaaggacttgtgtgggtagacgtatctaagactcctaatcaacctaaaagatgggttgggggagatgatggatgggtagctttgacaccagaggaagttaaggatttaccttggggtgaagacgggacaaacttagctgactgggtagcacaggctgaacagaaaatatcatctgacagtatcataaacacagtgctagggtctgaggacttcactagtgtatttgacacaaaagctaacacaaccgacttagataacttggcaacatatgaagacttagattcaataaaagaagactataaccgattaatcaaagaaggcataaacggtattgacttcaccccttatgtaactaactcagaactacaacagcttaaagacagttttaacttctctgtgcaacaagcaggcggggttaacatgcttaaaaactctttagggttctctgggttggacttctgggatggaacagtagggaagaacttgttacccaactctacttggaatctaggtttcggtagatggggtggtgcttcaatattccaatttgaagtaatttcaccagaggacgacaagcctacaagcaacatactagcttcaatgccatcacgttctgctactaaagaaataggtaacatacctcacccgataaaagtcagctctggtgagacatatacgataagtttcgattataaagaagacccaataacttacatgagtgatagacctatttttgctatacgtgtgttccctgatgcgaacacagaccaatggtctcaattcgctatcgaagagtggacagtagttgctaacagtagcaaagaagacttaactgtatggaagaggtatgaaaaaacggtgacaattaacactagtggataccttgatgtctatcctaaaaatacactagaacactggacacatcgttcttattggagagagctaaaaatagaggaagggactcaagccacaacttgggtaccaaacaaagaagatggagcgtttactgggggtattgttgaaaccacccaaacagaagagctagccaatctaggttttggctctggttttgttagttctaagagaggtagttcttcgttaactcaacccgtagagttgcccgaggtaggagacaaccttaaatactcactatctttttatatgaaagtaactacaaataacccagtagccgacttcaaatgcggtattcgtgtttatgaaggtgacgtactaacttatacattaggcgttgaggatgcaacacaaccaattccagtagggttccaacagtataagcttgtatttactcctacaagcacatctacaaagatagagatgtttgtagagaacgggcaggaagcatctgttattatatcgggtattatgtataatatcggggatataccacttaaatggcaaccatacccaagtgagatatataatacgaatgtaaagattgacattaacggaatcactgttaaaaacaaccaaactgacggttacacgatgattacaccacaagagttctctgggtattcacgtatcgatggcaacatagagcgtatcttcactttaaacggtcaagtaacagaagttaagatgttaaaagctgaaaaacgtattactatggcacccgtatcggtttttgctatgaatacaacaacagctacgagaaacattagaggttgggcattcgttccatcagatgaataattaaccaaactttttaaccgaaaacttcactaattagttgttttcggttaatttgtgttatactatatagagaaggacatgaaaggacgatgaaactatatggctttaaacggaacaaagtacacagcctttgcccgacatagattagtcttagagtggcgtgcaaatcagaatattgcaggcaactactcaacaataagtgtatggctgtacttacagtctatggataaatggggaagactagatgcccctgctattggcgatgcaaaagtcactgtagaaggtactacacagatagagaaagcttcttctatgctaaatgctttccaaaaaaaattattattagctaaagaatggagagttaaccataacaacgatggttctaaaaggataactataggaggtagttactttgtaaatattacttttacagataacggtgtatcaacttattatggaacgataactataccaaacttttctgtagacctaaataagatacctagaaaaagttcacttaaccctgttcccacattgaacttaccgggtaacttaccaataacaataaatagacaaagctctacgtttaagcatgacttgacagcatgggttgccaacagggagaacccaacgttaaacaatgatgcccattggacttacttggcagaccttaaaaatgtagccactagtgggacattcactttcacagtagcaaacaataaaactattttcaccgcattaaataacaggactagttggcagggtaaggtaaaactatggactcaaggtttagcggatacggtgagtcaggagaggacatataagattgtacctccaatgaatgcgcaagcatcggggggcaagataactttaaatgtaggggaaaaaattaatgtctcattaagtaactacaggtctgacccaaattttacttatgatggcgcatttaacattagcggtcttaacataccgatagctacaaattcagcaggtaacacaatgtcgtatacgctaactcaaacagatgttaacaacatactacagaagatacctaatgctgattcttcatggggacaggtgactgtaacaagtaaatatagcggggtgcaatacagaactccgtggacaggtcaaagaatagatatagttattcctaaagataaatatgtgcctagcattaatggggaacctacttatgaagatgcaagtagcgtttctgtagggcttacaggtgacaataaggtggctttacaaggtaagtctaatattaaagtaaccattcctgctaactttgcgacagccaacggttactcaaccttaaaaacaattgatgtgtcactgggtggtacaacaaaaacggttagttactcaaactcagaaacagttatagagttaggtgcacctgccaaacacacatcagatacactgatagttacagtaactgatagtagaggattcaaatctaactggacaaaacatgtagatatttacccttatgaaaacccaaatatggacttcacagttgcacgtagaaacaactttgaaacaacaacagatattaatgttaacagtacgtggtctcctattactatgggcggtgtaaataagaatgctattcaatcagtgacctatgcgactaaaagagcgggtgttggttcttttggggcagaaactgctctaaactttacatctaatggcggtatgattatagttagaaatgcacaaatagaacttgacaatactagcacatttgaagtaagattaagtgtaactgataaatttagtacatttactagaatagctacggttaaaccgggaaaccctattatgtttatcgactccgaaaataaaagtcttttcataggtaatgcctttgttgataataacaataatggtttaagaggactattagaaatagaaagggacaagtggcaggagaacggtttagtaggaatatccttaaacaacagtgatatatcagcagtcaatggcatatggttctcgacagatacatcaaataacggaggtgagggagttcactttattaaatcaggtaaaccaagaaactccttaaagtgggaagactacgactaccattatatgagagataatgggttctatgttaacaatgactctaaccctatatttaaagtttctgacactggtacgatgacgtttcctactaaccagctttggaaaggggctgcctatttaaacgaaaaacaagaagttttacctagtaaaaaactgacagagtgccgaaacggatgggttttgaccttctctgcatacgagtcaggtgcaggacaaccttgggatataacacagatattcattcataaatgtatattagaccagtttaacacaagaggattcagagccataataggtcatggaactacaataacatttaagtatatgtatataaccgatgggcgtattggtggtaatgttaataacgggacaggagttaataatggtattgttataagggaggtatcggaatggtagaagaaacgcaaaagatatttgtaacattagatgataaaaattttgttagtaactggggaacgtcccttaacagtgatgagcctgtctatgaaatagatttaccaatggactccccattcttttcacattactattcaaattgttttcagtatgtaaatggagagctagttctaagtgaagaaaagctattaaaagtagaactattagcaatagctagcaagtttagaagggactgtgaggagacttacatactacaaaaagttccctacacagtatcggatactacccatttatttgatgttattagtgatgacgagtttataaacaaaataacactcttagataacaaaattcaagactatgtagaggcacctgcctatgatacaacaggtgactttaaaacactcattaaatttgacaagtcgcagtataccgctatggctagatatatcaaaaaagtagttaaaactagagaacacaagttaactaataagttaattcctatgattgaaaatgctaagtctgtagaagaggctgaaaaagttcattgggactcagtacaagatgaaccattaccagagcaaggtactgatgaaccacaaagtgaacaaagcatagatagtttgattaaagaaaataaggaattaagacaaaaagtagaattcaatgaactagcactgatggatgcaattaacatgttctctgaaatgaataagtaaactatcattactgattaaaggaggtgatatttctatgtacccatatctatcaatgttatacgcatcttacgtaattaaagaccctgcgaattatcctttggagaaagttccggcactaattagagaagatgtggagaaaatcgtagaagaaatggcaaaaaagaacgaaaaacaagaatagttaacttagtagttggggtagcaataggtctatgcataggattgtgtataggactgttagcctaaactaatggaaatgaggatagcttcggctaccctcttttttcatactatattgtactatattaggagacgaaaggagcggttaacatgggacaatcagacggcatgggcggtacactaaaacgtattgccatccaaatagggaacgaccctaactcaggttggtacagatttcaggtaaacccaactcaatataaatataataaaccacaacgtgtgacaatattcaaaactaaatcaaacatcataacagaagactttgggaaagatatagaaacaattcaattctctggaactacaggttttagggtagacggaagaggaaagaatggagccgacaggttaaaagagctagaagctcttatagatgactatgcaaatagaggtggtaacggtaaccgttcaagtgttgagatgaaattttataattttacagatgataagttcttcatagtccatctagcaccagaagggatgagcatagagcgttcggtagaccaaccgttattatttaactattctttaagtctggtagtactgagagaagcaggacagccctcagagcgcaatcaggtatcacctcagatagggaatgtatcccctagtattgggcgttcatcatcaggtcaaacagataagacacctgcacaagtatacaacgaggaatatcgtaacagcattttaccgggtgttgcagttaaccctagtatcacaacaggagcatacaactttggggtagacgaattgaaaagaattataggatatggaggttaactaaatggctcaagtagaacaatcagcagacttgctaagattctttaggtacttaaacgtagatgtagagggggaagtagtggcaaacgttattgatgactcccctaactttatttctcgattttatacccctcatacaagggtaaataaaatatctagtactttgttagatatagtaagagacaacaatattagtgaaacaaacaagtccttatctgaaaactcaattacttataagttcttaaagagtgggcttaagctatccgctccttacatctacgagctagctcaaatcgttgtgttagagtcctttgcacttatctatgcgatagacgaaagccctgagatgtataagatgataaatgaatcagatgtaaaacaaacgagagagaatgtaaaatatcttatagactacctaggcggggcaaaagactatacagacatagtgatggatttacaatcaatggatgtagctttagggtatattcaagaacaaatccctgtaatacaaggagggttagcagtcaatggcacgatataaaaaacatacaatcgtatatggagagacaatgcagtctattgcccaattagaaacaaaatcagtagacaactgggtaaagattgcagagtacaactctttagtgtacccttacatagtagacactatggaagaaaaaatgaaaaatatagaacatcttgctacgttaggtgatgtcttaatgatacctgatgaaggtaatttgttagacatagacacaagctcccttaaccaaagggatacagacttcctactaggtttagctttaggtaaagatttggatatgacgagtgacacaactttttatgaaaatcacggaacaagcgatgaggtgttcgcattaacacataatgggcacggagaccttaaaaatgtaagtggagcagataatattaaacaagctactatttcacgattaatgactgctaaaggttctttaatgctacatcctgagtatggcagtgacttacacttgatgttcgggaaagctacagtagagcaaatgaaaattattagtattgagatatgcgataccgttttaaaagatagtagagtagccgagtgcgtactggttaaccactatatagaagaagaccactatgtaggtaactatagagctaccctacaatccacaagagaccagttcgagtttgtcgttcagaatgacaacgcaggagcacttatcattagttagagaggaaaatcggaatgagattaaagaaaatatcagaaattttgggtagacttattgatgtaacaatggttaacacccatgagctaaacgacttctccgtaggttctaccattcgttctatctacgaagcggtatccatggaactagaacagtattacattttaggtagagagaacatcttatggggaattgagcaaggtgtactaaacgcttttgattttagaaaaagagaagctaagagagcttacggaatggttacattggagttccacacagtgacccaaacacctgtatacatacctacaggcactacgttcgactctagtctatctggtgcaccaagtaagctaacttttcaaactatgcaggactatgttatacctgccggagtaataacagctaaagtagaagcatattgtactacagtaggcactcaaggtaacatacctaagaatagaattaatcgagtaattaacaatatctctaacctaaaagcagtttataatgaatttgacttcttaacaggaacagatgaagaaagcatagaatcagttaaaaagagatttcatgcttttgtggaatcaagaggtcgtgcaactatcaaagctttggactatggtacacgacaagtagaagaagtatcaggtgtgtacattaaagaagaagttggctatgtacgaatctatgcacatgatttaaacggtgatttgaagcaagaaactttagataaaattaaagtagctatcgaagactaccgacctgcaggaattaaattagatgtgttcccagtaataaaatcaaatgtacaggtgaatgcaacagtgacgattagtgacaaaagacgtatcaacgataagttagaggaacatatagaattaacaattagaaactatttaaatagtcaagtagtatcacaaccacttatcttagccgatttaattcaggttattatgaacatagatgatgtactaatctatgactgtaaaattaacaacatgacagggaacatgtctgttagagatgaagaaatcatcagagcaggggaagttgttgtagagcttgtataacaggaggaaatataatgggtaactttttaaaaaatatacatccccttttgcgtagaggaaaacagcctaacaaatatgatgacagcaactttgcggtattgaatgcattgaactatgaattaacgcaagcagaacaagagactattgctagtaagattcagtcgtctttagagtcagctactgatacttacctagacacatggggtgactggtttggtgtttatcgtaaagacggatgggatgatgaatactacagaaaacgaattattcgtgaactattgctaaaaagaggcactattcctgcaatcattgatgcactagtggactttttaaacgataatgatgcgattatcaatatctatgaaccgtggagaaacatatttactctaaacaggtcaaaacttaatggagacgaccacctaatggggtactactaccgctttgctattatagacatctctatagacagacctttcccaccagaaattgtagaaataataaaagcgtttaaacctgccggagttaagttttacttaagactagacactagcttaaacgtcaataaaacggtcgtagagagtccttactcggaaattgacattattagtaaggaagagctagaactctttacagggctgttctacgatgttataggggacataactttgtctaaccaaaaagaccaagtagttgagaataacatattccgtacaaatagctctatgctgaatggggaagatgtcttagcaggggctttcgaccacggcagaggtctaattcacttagctagtgatatgataacatcagcattcactcctacaaaagaagactcattaagcacagttaagactcagctaggagaaggttctcccgacatgtatttgtatacgtcaaaagcggatggactaactgcacagcttagagtacccgctatggttgagggagagttagagcaggcatcttcttatgtggtatttgacatcatgaactatatagaaataaatgctaaacaggaatatgaagaattagtggaaaaacacggtgagggggcattagatattctattgtctaacttagaccttagtactaggctaagagcccttgtatcccctagtaacccagtaaaaacagatatagctatatttgacttcaccactaacaattggttttctattagtgaaataaacatatcaagaaactttactattacaaactcaggagtaaacagagtatccgaccacataaacgatagtggcttactatttatacgtattgcatgtagtagaaaagaaacagatgcgctatttgagatagacacactaaacttaacatttagttatcgtatgggtgatgggtacagcattggtctacaggcagaagtagaatcgatgtcagagctagttccagtaactgcaggtaacgagtcggaaactccatagaatagaacagttataataaaagtagtaacagctaaatatggtataatataaatagggcacagtcttgtgtcctatttttaaaatacatgctatattaaaaattgaatgaataagaaaagaggttaataatgtggctattgcaacgaataatgcacgagtgtatgcctcactccaattaaaaaataaaaaagattcaatgtacctagctttaggtaaaacaacgccatggacaaatgaatctgcaccaccaaacccagacccaaatacgaatatactatcagaagttgtagggtataagaaagtatctaagacgaacctatgcagagcatatattgaaggggacgaagcaaaatatcccactgtgagttacggttctcgtaaatttactcttattcctgatgaggacgggtacaaggaacaggcatggatggtctatgtagaagcggaagtaacaggagacgagttacctctaggtacatttagacaagtagggattcacacagatgtggtaacaaaagcaggagcaggggaacagaaagctttcacccctaacgaaataacagatacaggcatcttacagttctttgagaatagacaacaacaaaatagaaccgctgatgttatcttaaaagaaaaatttattattacaatggaaaacagaaaatctgttatctgagaaaggacgatagacattggcaaaagaaataacaaatgaagatttgaagagagcaccttatcttgaccgttttaacgcagaccaaaacagaacaagggtgctattcaagccagacaaatatctgcaacaagcagaactaaacgaattacagtcaatgcaagattacgcattgggtaacattgcagaagctatctttagtgatggtgacatccaaacaggtatggagttcgtattacaaggtaagacacttactgttaaaaaaggtaaagtgttcctaggtggtaaaatgcgcaactttaatgagcaaaccatcgaaataacaggaaaaggtactgaatatattggggttaaaatagtacaaaaggttattacagcagaagacgaccctactttgctagaccaaacaagtggagttcctagtcacttctcagagggtgctgaccgtttagaagagagtattgttctaactctaaacgatgaagttggggcaactatctatcacttcgtagaaggggagctttatataaacccagatacacctgagatggataaaattaacaaaatattagcagaacgtacatttgatgagtcaggttcttatcgagtacgtgggtttgatatgtatacagaggtacacccaactgaccctaacaacagcattcagttagttatcgatgcaggtagagcttacgtgttaggtttcaaagtagacaaacctactactagccgtatctctattgaaaagtctaaagagctagaaacaattaacaacgagggtttctattactctaatgcaactcgtagaaataaattaggaaatgctcctgtatctacagtagacagagttaccgctcaagtacaagtagctaaagagcaggtttctcgtggcgttgtaggcggaggtactgactacctagcaaacacttctgttacgaaagtcatccgtgtatggacagaaggttcaggtgcacaagactataaacaaggggaagacttccagttaataaacggtcaagcaatctcatgggcacctacaggtcaagaaccccctgccggtgggacatattttgttcaatatgtatacaataaaacgatggtagaaaatgtagactacaaagtggatataacaggtgaaggtgacgatagagagtggtacatcgacttcaatggtatgtctggctctaaaccagtagatgaatctttagttaatgtagactacaaatacttcttagcccgtaaagacttgattgtgttagaccataatggtaactttaccgttcacaaaggacaaccaaacgcattaagacttgtagaagcgcctaatcatattgacccattagtgttagctattggtacagtaactgtttacccagattccaacacagcagaagctaaccaatggacgattactagacttaccatggaagaactacagaagttgtctgtacgtgtagaaaacatggagttcaaccaagcagtattctacttagataagcctgctatggaaggggagaaccctatctatctacgtggcgtattctcagatgcatttatttcgttacacaaatacgatgtaagccacccagatgctacagttgcttttgatttagatacagcagagataacattaccatatgctgaaatcaataagaatgttcctagcattatagagggttcaagtgaagctcacgtttggggaagactagtaacggcacctttcacagaagaagttggtatcaaacaaccttttgcaacagaagcgatgaacgttaacccgtacaacaccttcaataaacagggtgctttaacactaaaccctagtgctgacaactggattgaagacgagcggataaccgtaacaaaagaagagacttctacaatgactgtaagacaatggtggagacatggtggagcctcatggactaacgatgagatgaacatggtatccgacattaccctagaccccggtcaatcatggggcggtgcatctggtaaggaagaccttcgtggtaagcaattatcaggaacatcattatcaagtggtggacagcaaactaaagagtctatgattgagttcatgagacaaattgacgttgagctgtacgcagagaacttgcaaccaaacgcaaataacttagttgttacattcgatggtttaagagttccagttaccccttcaacgggttaccgtaaaggtgctacagaaggtactggtatggctaacgcagatggtacatttaaaggtatattcaagattcctgcaggagttcgttgtggtactcgtgaggtatctattcgtaacgacactaacttagctagttctacttttaccgctcaaggtactaagaaaactactgaggacatcatcattcgtactcatacaacgattaacctagtagaccctctagcacagtcatttagtttcaatactaacagagtggcttctagcttcgatgtattctttgcatctaaggataacagcactaacattatttgtcaagttcgtggtatttccgaaggtggacaaccaaataaaacggtatatgcagaacgtgtattaaaaccatctgaaattaaagtatctgatgatgcaaccgttcctaccaagattacttttgatgacccacttatgtgtaaagcaggtcaagagtactgcttagtattcattacagattctgacaagtacacaatgtggattgccacaatgggacaaacaagagttgatgacccaactcaaacagttaactctaacccttacctagaaggtgtcctatatagttcttcaaatgccagtgcatggtctattcaccaaacatccgacttgaaatttactgtatatactgcaagtttcaatgaagaagctgtcctagagtttgacgtaatgaagaacgttaacgtagaccgtattgttcttatgtctacttaccttacacctgctaatacaggttgtcgttgggatatgaagatggtgttagataacgagccttctggtacaacagtgaacgacaaaccatggttacctattgctaactatgtggacttagatgttaaccaattagcccgtgaagttaaacttcgtgcaacattcaaggctaacaagtacatgtcccctatgctatctttagatgacattatgtttgcgggcttcttaacagcattgaagggtagctatatatctcgaacaatagacttgtcagaggcaccattcaatacaatcaagatgtcatacgaacagttcacccctcccggagctaccgtaacagctaagtacagcttagacggtggtaaaacatggaaagagtttactactcaaccaactgctacacaacgctcacaagagtttactcgtattgactatgtagaaaaagttaacacaggtggtaccgagaaatcagttaaatttagactggacttaaaaactcaaaatagctttgcaagaagtagagtaagaagattaatgtgtaatatgactgataaatagatataaaaacttaatgaagccttatatgttataataaacgtataaggctttttttatttggaaaggagagttaattatgccagaatcatatagacagaaacactctggtgctttaatattcagacctactgtgttagaacaagagcacatagaaggtatgaaagctgttaagaaggatagagaagaacttagcaaagaaattcagagtgttagggctattaaacaagaattactaaaggagttagaggaattaaaagagttgaaaaacaatgattaactgatacctcacctaaaaaaatgtcctatttaaaaatttctatttctttatatactaaaatataatatttaactaatagtatataaataattaataatataaatatataatataaggcactaaaaaaagttgaataggacatacttaataaaaaaaatatttgacacatataaaatttaatgctagtattaggttactcagttggtacgtaattggttaacctaacacaagctgtttaacaaaggagaccaattatattgagactagtagtagatattatgcacacacagatacgatacgaggaatcagaacagcatttgagaccacagatacacaaggcaatgcacgaacagttaggggtcaaggctgatgggtacaatttcagccctgcctataaagcaggatactgggatggtatcattgatttcttcgagaaagaaaacgatacattccctagtggcttacttccgcaagttgtggacatacttggtggcttacaagaaagtttgtcgagaacagggtatatcctccaatttgaagtcatagacgatagaccagacgaatttatgtcggtagctgatatggacaaacagattatcctcaatggtgataacggagataagataacactccgtgactaccagtatgaatctgtagaacaggtaatcgaaaatcgcataggtattgttaacgtaagtactggtggaggtaaaacagaaatagcttctggacttatccaacagataaccccttatttagagtcaggggaacgcattgcatttttcacaaatagctcttctattttttcccaatctatcgaacgtattgagaaacgtttaggaatcaaggtaggggcttttggggcaggtaagaaagatattcagcaggtgacatttgtaatgatacctacaattacctctgctatttcagcagacccagaggcaaagctaaaacttacagctaaagagagattatgtaagagattagcaaaagaggtagctcctaggtttttaactggatttaaccaacgtagccttttagaagggtacatccgtaattttcaagttaaaacaaaggtagacttacaacttaaacatgagttagaggaaatttactattcgtgtggcacaaacaatcaagtgttaatgcgtatgaagaactatgaagcggaatatcaaaaaattgtagagaagaagaatgggaaagttcttaagaaatacaatgaagcaatggacttcctagactccatagcagtaatgattgtagatgaagcacatcatacaagctctgacacatggtttaaggtactaacctcatgtaataatgcgcagtacagaatggcgttaacaggttcaatcgaccgctctaaccatgttttgtggcaaagactacaagcaatctttggggaaattactactaaagtgtctaacaacacgttaattgaactcggtcactctgctaaaccaaagattactctattccctattattgctcctgtagacatacagaacagtaactatatggatgcctatcaaaaaggtattgtagagaacgagtatagaaattcccttattgctaaattaacgaaaaagatgtatactagaggaaacggcattttgattatcattaaccgaattgagcatggagagtctattagcaagttacttgacgaagagaaggttcctcattatttcattcatggagaactagataatgacttaagagatgagaagattcaagatatgcgggatggaaaacttaaggttatgatttcctctactattatcgatgaaggtgtggatatatcaggtattgataccctaatattaggtgcaggaggtaaatcattaagacaaactttgcaacgtgttggtcgtggtctccgtaagaagaaaacaggggagaacaaagtagaagtatttgacttctacgacttaacaaataagcacctcaagaaacatgcagaacaacgaagaaaaatttatgaaaacgaacaatttgatatagtggatataccactgccaaagtagaaaggacggaacaaaaagtgagagacctttgtttagacgattcgattaaaacaaaatatgacttaagcaaaggggcttttagcttgttagagaacttagcagggaagtctcagcggtggggtgaaacagtagcctctaccgtccgtaagactgacatcgctactgaattaggtaacgatgtacgaacagtaacacgcaatattaatcgattaaagaaatcgggacttattgagacatcaaccaaacgtggaggtaacggaggcactgttgtcgtgtttaatacagacatgctgaattttgaagtaacagacaatcctataacttccgatagtaaacaagctgaggaaatcagagagattgcttttcctaaagctccagttaaggaaccaaaacgcagataccgaactaaggcagaaattgccgaagcaaaattactacaaggagcaattaacagtaagatagctaggcttaacgaccaaatagagttcggagagataacctacgatttctttgaaaattttgaggataaacgtatttattttaatgcatatttactaacaagaatgtataatgcctatgctactattgtaccttaccaacgttacctatcgtataaagataaggacagtaagaaagctgagcaatatcaccgtatatatctacgttctacttgttatgaggtactacctagacgttttgtaggtactccacaatacaagaaatttgtagaacttgctcagtatctagcggataataatatacacccactagtttatctgtctgttcagtttgatagagcggactatttatcttctattggcaaagctcgtgtaggagcaactccttatgttaatactttgttgtgtgacgaagcaaaagaggcatataacaatagtgtaaacttctttaaagacttaaaaagagattatggtctttacgaatgtatgcactcagaggggacttactatggaggttcatacccaatcttagtggctttattaagtgcatataacggagaacctaaaaacctttctcaactagacagtactttacaagaattagaatttaaaaaagaccttgacaaaaaagcgaacacgttgtattcttactacagaacaactcttgaagcgttagaagagtcagatgtatcggaaaaagggaaagctacaattaaaaacttcttaaaagagcagattgccacattctcaagtaaaagtgggatgacaacaacacaatttgcattagcattccctcttcaacatagctcagctcgatatttattagaacaagacgagaatttcacagaggatgatattaacttatatttaggtaatcagtctcgtttaacaaatatttccgatgaagatgctaaagcattcatggcaaacgggaagaaaatttatatgtcatggtggggagctacaagcttccaacgtacaatgtttatgttagctgatttttacggattcaagactcgtcctagtgaattaggggcatatattaaagagtttgggttagagaaaattccacttgacctagcaggtatgctagacgtgtcacgtatttatgcaaaaacgatgacaagagaggaaatctacagaatcgatgcaaatgattgggctacacaaaacgaacttagggagtttgaacagtacaactagagagagaaaggaatggaactaagcatgagccagattcaaaaacaagttatttacagagcaattagcgacccgttttttgcaaaagatattttcagaagattacctatggaggagtttaaaggtactgggtacgagatgattgtatctacaataaatctttattatcgtacacatgatgagacactagatgaacaaagcttgctaacccttgttgaggataagatgctaaaacaagggaaagacctttcagaagcttctgaaacctacgatttagtaagtggcttatatgagttagacttagagaatgtagagtcagaagttatcagtgagaatattaatagctatgtaagaaaagtcttaactcgtgaagcaattatggaggctgttaccaatgaaggcacactaggctctgacgaaaatattcaaaaactgatggataacttaagagatgttattactattgaaacaaacagtggtgattctgaacttatcgatttctttaacgatgtagataagaaaatggaattgttagctaacttacagcaaaacaagtatcctacaggatttactgctattgatagcatcgcagatggtggactggctcgtggtgaagtaggcatggttattgcctcatttggttctggtaaaacaagttgggcagtaaaccaagcaaccaattatgtaagacaaggactaaacgtgttgtatataccactagaggaaaaacaagaccgaatgctgattcgtttcgagcagttgctatctcgtatctctaaaaatgaaatcttgaatgatggtgtcttacgtaaagacttataccagaacattcaaaatgcttatgcacagatgaccgagcaacaaaactgggggagtttgctaattcgtaaataccacccacaagaattaacacctaatgggttagctcagctaatctctgatattactatccgtaaagggatgaagattgatgcagttattattgactacccagacttgatgaagaacccttatgcttctaatggaaatgagtcagaagcaggtggtcgtttgtacgaggagattcgtgcaattgcccaagagtacgactttgtttgttggactttatcacagcttaaccgtacaaactttgcacaagacgtaaagaatgcaggttctattgaaggttctaaacgtaagcttaatgcagtggagctagccttcacaattaaccaaacaccagaagaatttagtaatgggttcattcgagtatacatcgataaattacgtaataatagtggtaaagcatatgataaaatgcaatattttaaagtatacccagaaacaatgactatttgtgatgaaacacctgagcaacgagaagaacatttgtccctactatcagaatctgctagaggtacaaaagaaaacaactcaggttcaaataactattcagctaacatggttaaccaacgtatcaacggagtaaataataagttgcaaggaggttgggactaatgaaacatattattaacttttctgacttccatatgcacttcttcaaagacttctctgagcctgacccagaatatgggacagaccgagctagagagcaagtaatgattttagataacttgttaaaatatgcaaagtctgttggaggagatgttttattcaacggggacttgttccataaacgtgtctcaattgatgtacgattatttaatatgctatttaatgtattcagttcttacccagaagtagaggtatttctactaagtggtaaccatgataaagtaacaaactctttattctcagagagcgccctagaaccttttggggcacttcctaacgtaactgtgtgttctacctatggagtatacgtgagagatggttataccatctatgcagtaagctacggagacgaagtagaggaaatgaaagaatggattgctgaacagtccgatttactagataaaactactgtaaacatcctatgcgcacatgtaggtgtggatggctcctctacaggtagctattcccacacactaggtggtgcatttactgtagcagacctctacccagataaatttgatattgttacactaggtcactaccataaaagacaattcttaggtggactagacaatatattttacgtggggaacactctacaaacatcatttgcagatgaaggacaagaaaaaggatactatgacattaagattacaaagggtaaccaccataaacaacatggtagctatgtagaactagactttattagaacagactatacacctttcgagattgtaacagcggacagtccttcctctacaggagcattggataaagcctatacgcagtttatcggtacacccgaagaagccgaagcagtgagaaagataaaagaaaaaaataatctaaaaaatattagaattaaagttcagaaagactactatgtagagcctcgtattaatatatctgcaggttctacaccagaagaggtaactcatgcttttatcgataaaaagtacaagaatgctgacccgttgagaataaaagcgctagattgtcttaaagaagcaactcaaatttaaatgaaacccctagtaactagactatattgtttaagctactaggggttttactattattactatttagttattgacaaaacaagataataggtgtatactaagaatatattaatacagaactatgggaggtaacaatgttaaagtttaaaaaagtgtatgcggaaaactacatgtcaataagtaaagtagaattagagcttgacaaccaaggtcttgttcttatagaaggtattaacgatacaaatgaaactttccaaagtaacggctcaggaaagagtaccttgctatccacagtaacatatgctttgtatggagcaacccctagtggactaaaagcagatgcagtaattaataaagaagttaaaaaaggactagctgttatcttagaatttgaaaaagacggcatcccttatcgtatcgagcgctatcgcaaacataaaaaatataaaaacctagccagatttttccaaggagaaaacgatttaactcagaagtcggtagcagacacagatagcaagattttagatgtatttggtattgactatttaacatacgcaaatagtattatgtacggtcaaggtaacgtagagatatttgctactgccacagataaaggtaaaaaacaaattttagaaaatttagcagatattggtgtatatcgctatgcacaagatgtagcgaagaaacgagcacaacaggctaacgcacaggcagaggagctaaacagacagtacttagctaaaaaatatgacagagacaacctaactagtctgtacatgagtgctctaagtcaatatgagaacacagcaaagttgctagagcatactaaagaggagttatcaaaagcagaagaggtagtcgaagaaagaagtaaagaactagactaccatacaaaacaaacaaccactgaggtagctactatacgggaacaaatgaacaaattagtttctcctgaaaatgcaacagaagtagacaagaaagttgacgaacagtattctaatgtaactcgattagagcaggctaaacagcagaatttagcaactattactaaactacagcaagatttagcatctgttcaaacaaacacaaattgccacctatgcggggctttactaagtccagaacatagggaacaagaattacaacgtattcaggcagaaataatagaaaaacaagggtttattacaaaaattgacagtgccctagcagtgtatacccctttactagaagaagccagagcagaacaagcaattatgcggaaagccattcaggaatatacaggggactaccaaagattatcaaacgagattaacacgctcctaggtaatctaaatactctgaaaaacaacctagactctgctgtgagggaagtagactcaaaacaagatatgattaaccagttgaaggcagtacctaagccagagtatgataaacaaacagagaaagtactagatgaggaactagctaaaattaatgagaagatagaagaattgagagaagaggagagacaatataatataattgctcaagaggtgttctccaataaaggtatccgttcagaagtgctagacttagtgacaccattcttaaatgaacgagctaaccactacttaagtatactatccggctctgatattgaggttaactttagtacacaaactgagaaggcagacggtagcctatcagataagtttgacttagaagtaataaatggctctggcggtaatacttatcaggctaactcagaaggggagaagaaacgtatcgacttagcaatctcatttgctatacaagacctagtacaatccaaagctaatatcgcagtgaatttagggttatatgatgagtgctttgacgggttagatgctataggttgtgagaacgttattagaatccttaaagaacgccaaaaaaatattagtagtatattcgttatcacccactcagaaaatcttaaacctttatttgagaatgtgataactgttaaaaaagtcttgggaaatacagccctattagaaagtgagaaaagtaaagcatgaaactatatacagcaagtagaaaattaaaagagggttcggtatcaatctctattgggggtaaagtaaacagattgtttcattttccgattgatacactttttgattggtacccttgttgccctagatatacgtaccagtacagcacatcacgtagaaaattctatatcagactatccgactcagacaaaactcttaagccctattatggtgtatcaaataatagtaaacgagcttcttcaaaaattgcttgctttaaagagggagagtggtataataaagaggtagcagaagataaccaaaaattatttaagcttgcacaagaatatggaattgttacaccattaacgaaagactatacattagagcaagttgacaagagtattgagagtgttctcgacatttttgatttactgtatagtaaccaaaaagctaaggtcgaagatgagttactagccgagtgggataaatataagcaccttcctttagatgataagaacgcacagaagattcaaaaagaagttagctattatacaggtttatcgagagaggagaaggctagctacttactagctaacccatcaacggagctgaaaaatacttatgacacatttggatgtatttatactatgttaattacaatgaggaaagtagtggagtagatgtttacagacttgctagacagtgaactaggaacagctaaatatgcagtgaacgactatcggtataactgccctttctgtggggacgatacaaaacataaactgtatgttagagtcgaagaggggcaccctaaaaataacttgtggcattgctttagatgtggtaactccggtaaccctgtatcttttgtgatgaagtactatcatgtatcatttccggaagcactgagtatcctagaaggatatgggtaccgatttaataacaagaactatatacctaagtcagacaaactaacagacgaggaatacctattgttattgcttgactccattggtaaacctaaacaagaggaggagctacttgttaaccttacacctcctccattaccacaaggttttaaattgctatcacaaaatcttaaagacccggaagcttaccccttcttagcttactgccataatcgtggattcacattaaatgacatttacacccacaatattggttatgtcatccactcgtgggttcctttaggcaatggcaagtctgttaaactagataaccaccttgtgttccttacacatgacatgcaaggaaactaccagtactggaatactagggcaattggggaaagctttgttaagtccctaaatgcccctagtagtgacacagaatactctaagaagaacactatttttaatcttaatcgggctgtaaaaacaccccaagtagtcataacagagggtgtgccagatgcactaactgtaggtgaatcaggggtaggtaccttcggtaaacaggtaacagacaatcaggtacagcttattatagacaacattacagaggagcagaaagtatatatctatttagacaaagatgctaaaacagaaatgaagaaactagcagagaaactttataggcaacacgaggaaacataccttgttataagcccaacaagtaaagatgcaaacagtttaggtagagaaaagacatgggaaatcataaataactactctgttaaagcagatggggtaggtttaataaaactaatgttatagacaggagagagaaggcatgaaatacacactagaagatttatacgcaggaatgaagttacgttgcaccgacagtaaaggctacagtttttggactacgaataaaatctatgaagtaattgaaaaagagtcgggtttattatgtatttttaatgatgacggaaacgagagttggggtaaagacatcttagtacgcttaaatggtaatacaggaaacgcagagtttgaggtttttagaccctacactacagacgacttatacgaaggaatgaaggtactttgtactacctcggcaaaagacagagagttcatagaagggcaagtctataccgttaacaaaagtagaacatggggttactatattcgagaccgtagtggttttgaatggactgccggtggtattgtacgtttactaaacggtgctacccgagcaatgtttaaagtagttgaaaaagagaagaaaacagaatacacagagaaagacatctatctgggtatgaagttacgttgtacggatagtagtaacttagcttactggggaattgatagggtttatgaagtaacattcgataaacaatacgggctagttattgcaggagaaggtggtagaagccatagaactacagaatacattgtacaagcactaaacggtgaagccccagttaagtttgaagttgtggaacagcgtagtgcaaaagaaaatattctagctatggttcatgagttaacagtagaagcaggaaacctaattaacgaacgtgaccgtatcgatgtacaggtagcggacttaatggcagaaacccgtagattaaaaggaatcgttagagaaatcgaaaaatttgaataatacttgctgtaggaggctaacaaatatggaaagagtttcagtatactttttaaatagcatgaacattatggatgaagacgaaacaaagcgtacttatcatggtacgtataactcaatggaagaagcagaacaatccgtatacgactggtgggaagcaaacgacttcaaatgtgaccgtctacgcatcctaggggacattaaagacggtatcgtacgttgggactatggtaaccataacggcttctacctattcgtattagagggtgcaaaggtagaatacacaattcgtgaaggagtaacaccgccaaaacgtggtagagagaacgatgtagctcatgacttattcactgcagatagcggagtgttggttccgggtcgcttaggttctaatgttatctctacaggtattaaaactgcgtttaaccctaaagaatatggactattcattaaccctcgtggaggaatgatgaaatacccaattacactaggtaacacacagggagttgtggagggtgaataccgaggagaggttggtttaccacttaaaaatacattccctatccagttaagttaccgtgctatctcaaaaaacttacttgttattaatgaagagggtaagttagttggtgttcctgtagatgatgtacgagaagcctacccagagtttgataagctatatgaagaacagttaaacaaactaagtgaagagctagggttaatctatggggaagcagacatttacgtagatgaacaaaccgttattgcaggaacactatttattccaaaaggtactcgtttatgtcaagcattcttactaccacgctatgatacacaatttattgaagtagacaagctttcagatacagaacgtggtacaggagcttatggttcatcaggggtgaaataatgcgtatccctccgttcaaagccccattactccatgtgatgggtagcttttctattagactagaaaaacaccagtgtagtgtcacctttgatttaagaccagactacctagggacacctttcgataaactaaagaaactaattgagattacctatcaagactatgaagtagttgaggtagtagaaatagataacaaatataaatttattcttgcataggaggagttatgatgtttgcaaaagaaagaaaagtaacacaaatgatattagagattgacgtagaaaaactccataaaggtgacattattgggttcactgtaaagagtagtgccgatggacatgcgttaaatagtagagcaacagtaggttgcataactacggtaaccccacaggggatgatggtgtatgacttagtagataaagtaatgcgtaacatctctcctgcagagcttgttggcaatgatattatcatccttaacacagtagaagaactagtaggagagtacaaagaactagcaggtatacagttcttcggtatgtaaggaggtgaggaaatggaatttgctgaatattttaatacagtacaggaaaaattcctagaaggggacaaagaaggtgttgccaagttagctaacgaggcaggaagcaacactatatcttactcagaactagaggaagctttatctacgttagtgcgtaacacagtattagcaattgaagaaaataaaataatgcaagaaataaagttaaatgtggtattgcgtaatatgaaagagtgtggtataattactaaagaagttgaggacaaaatccttgaaagctttaaaactatagaaaacttattggaggaaccagaaaaatgaacaaacaacaaaaacgtatcggagcactatcagaggaagacatgaaagtatgggcagaatggctagtgactggtaatgtaaaagatgaaaaacataaaaaacagttagagcgtttaagcaaccgtagcgttactttagctgatgtgtctacagtggttgatttcatggggagacgtaacgatggctatatctcttcattagtagagcaaacagcaattacagagaaattgtttaatagattaggaattactcccgagattcgtcaagaagtcaaggaagaatacgaaaaagaattagaagagctacaaaagcaaattaaagaaaactataaagaactactacgtaaagtggaaaaagaagaaaaagaagctaagtaacctagcataactaaagaaaggtcggtgaaaagcggtgacagactatagtgcagtaggcaaaaagtccagaaataaaggcggtaggtttgaacgagaaaccgctaaattactttctaaatggtggggacatgagtttcatagagtccctgcttctgggggcttacattggggttcaagtaataacgtagcaggggatattgttgtgcctaacgatgcaaatttccctttcgttatcgagtgtaagaatcgtgaagaatggacaattgaaaatctatttcttaacaataaagaattaaagaattggtgggcacaagtggttggagattcagaggaaacaggaaaaattcctttgctaatctacaccagaaatagagcaaagaacttcgttacaatggcttacaacgaaaagttaatcgaagagattgaaagacgtaagttcccactaatggtttctaatatcgaatttaaagatgaatataaggatgtacactgctacaaaacttttacaacaacgttagaagcaatcactagctttaagccgtttggggataaaaatgaagagtacttcttattttattttaaagactacaactggaaagacagcttagtttatgaaacaactgtaatggacgatgcaaaacaaatggacgtagaggactcactagatgctctagtagactcttacctagatggaggtatataatgagtaaaacgtaccaagaagcggtagcaacaatgagttcctatttatcttcggaggatgtaatgagtaatacttcaagtatatctatctcttttgtagagaattggacaggtagcaaggagcattacgtaatggacactatgactaaagaagtggcacttcgtgtttttagcttagaaacagctcatgtagtgcttttaggggactctctaccaaaggacagcacagagtcagcagaaatgcttagcaggcttaagaaggaatttaaacaggcttctaaggaatttgaacaggctattgcagaaggagacagcaaatgaaagacaatgtaaacagccctagtcactacacgcagggggacattgaagttattgaagtaattgaatatatcacagctaaatacccagaagatattcgttaccatattggtaacttaatcaaatatatctgtagagcgccttttaagggaaagcaacaagaagacttggataagagttattggtacttaacaagagctcgtaaggtgctagctcaaacagaagatagctactcaggcaaatgtaaaagcttcattaccaacttattagctagaagacctgttaacggttattatttaattgagttgccgggagagcctatcattgacaagtttttacgtcaaacagctcagaactacaataagtatcaacagaactctatcggatatgctttacttaaactaaattctagttcaggcaatgtacaggatgtcctaaaagatgtagattactttttaaaatttgtcacaacctagtagcatacaatgcttcttctatagagttattctttatttttatgttataatagagatagggaaactaatattagaaggagcattttattattatgacaaaggcacccagagtaaaaagattgaacatctataacaccgatagatatttcaatattaacttaatgaaaaaagatgagataacaaataaaataaaagttactcggtttaatgaagaagaaatagaaagagagatggacgagttagccgaacagtcggttgatacccctattggacgattagataaaaaaaataaaaagtcctatattctgtatcaagagagatatactaacgacagactaattcagaagttgcttaaatatgggggttcagtatcttactatactgatactattgtaccttattacgttattgaacaaatatctaagaacttaacaagtgaagtaatctacccaactaaaaaacattacacgaatagagagttagagaatatacagctaacatttacagcgtgccctgtaacaattgactgccctgtagtactaccggatacaagcccttatgatgttttattcgcactacacccattaaaaactaatgtggacaaagttcaaatatctttcccacgtttaacagagcaagaaattgaagaaagacaccaagagttttaccataaagttggagactattacgaagtgcgcccagagtgcaaatacaagttctttaaattcgttcagacttccttgtctatttgggcaatgaacatttggatagtgtgcgacagccaagaagattatgaagcaattgaccgttttgtgcaaaaagagaaaaataaacgtaacgcaaatagagaacgagcgcttcaaagaaagggtagagaagatgagtaaaggtgagacaattaacagaaatgacattgcccgcactatatctcatcatacaggctaccgtcttaaagatgtactacacattttagaagtagaagatgaggtagtggctaaggctatatctcaagggtattcggtaaaaaatcataaattatggaaactgaatattaaaaagaaacctgaaaaggtcgcatgggatggaattaattctaaaagttttatccaaccagaaaagtacgtagtaaaatttactccactgtctaaattaaaggatgcaatagatacttataacaaagagggcaaataaagccctctttttgtcccttaaagttcttgacaaaacacaatactggtggtaaactactaatatagacgttaggaagagaggagacaaattagtgaaaatcttatttttacaggagtacatcagggaaaatcatgttaaaacagaccgtaatgggcaaagtacagtagacttcaagcaatcagatatgggtaagaaacttactaagttgctaaatactattggtcttactggtagagactatgccgtagattatgtatacgacatgattccagaagtgcagaaagttaaccctagaacaggtaaaccgattaagtacaagacacctacgctaagacagcgtaaagaaccagaggagcggttacttagacgtttattgaaatataaaccagatattatcattcctatgggggagatgggttgtaaaaacttattaggtagtacttctattacaaagaatagaggtgtaccaactaagaaaacaatcacaaatgaaaacgcactaagagaatcagaagaggtagaaggggtatatgaagaagtagactcttttgaaacatggatactacctatgttcagcatggagtactggacagctaacccaaatattgagaactttattacagcagatattggtacattaggtaaatttattcaagaaggggaacaagcatttattcctaagaaagtaaattatgagttggtaatgactattgaacgagtaagacagatattcgggtttttacacaagttcaaaccagtaacttcatgggacttagaaacaaacagcctacgtggagatttattaggagctaaaccacttgtaatgtcccttagttgggaagaagcacaaggtgtaactattcccctagaacaccacgaagcaccatggacaccagaagaactagacgagatttataacttgtttaaaatattcttaggagatgccaaacaacctaaagtgggacaaaatatacagtttgatattagattcttaatgggtacaaaaggcttcaccgaatttgaagataacagagacacaaagattgcctactacttaatcgtatcacaaaaggtagaaagttctaaacggttatcagatattgcctatgaattaacagacatgggtggctatgacgaaccattagaagaatacaagcgtaaatataaagaagagtatattgctagaaaaaaagaagagattgacgagtttaagaaagcggagaaagctcgtgtagaggcagagtacaaagaagcaatgatagcctataaagaagaagtcaagaaggctaaaagattagggaaatctatgaagacaattgctaagcctgtgaaagaaaaaatagatgtacctaaaaaatctgatattaaacttgtgaatgaggtcgatggaggtaactttaattacgactggattcctttagagattatgcacccctatgctagtggtgacacagactgctgtttgcgtatctataacgtactatataaacgtatcgcagaaaatcctaagatgcttaacctttggctgaccttttatcctagactgacagttacactagctcatattgaagctacgggtgtactactagataaagagtatgcagacttaattggacgtatttactcagaggaagaacaacgattactagaggaaattcgtaagttcccagaggtgaaacaactggaagaagagcatatgacgttatacaaagcaggtgtagctgaaatggctaaaccattaaaagaccgtgaccctagcattgcatcactaagagacaagtacaagattactgatacggaaaataagacacattttaaaccaagctcagcagaccataaagggaagttgctattcagaattatgggacttactttaccatatgataaagaatctattaaagcttctgcatttgataatggggtagctgagagtgaactaacatggtctgactataaaactgataaacacgctctgaactacatcaaagataactacccagaagcagaagaaattgcggaactactgttagagtattctaaagtaaacacgcttaagaacaactttgctcttaaattaccattactagtatctaacaaggatggcatgattcatggttcttataatattacaggaacagagtctactcgtttaagtgcaaacaaccctaacatgcaacagttgagtagtaaagtaggagaccctcggcgttttgactataaatacccaattaaacggttgtttaaatcaagattcccagaaggtgctttgttacagcttgactactccgccttggagatgcgtattttaggtttaatcgcaaaagatacagctatgactcaagcatttattgatggggaggacatgcataaagccacagcctctgttgtatggaatactcctattgaagaagtgacaaaagacatgcgacaacaagctaagagtgtaaactttggtattgcttacggtgagagtcctttttcaattgcgcctaaactaggtatcacaacagaagaagcagaacgtatctttgaagactacttctctagtaaacctaatattaaaaacttcattgaggaaacacaccaatttgcacaagaaaatggctatgtagaaacattacaaggacaccgtagactactacgtgatgcattctctaaagataagaaagtatttaatggtgcaatgcgtaaatcagtaaacactattattcagggaacaggtgcttacctaacgaatatgtctttagtgtatattgatgagtacattagaaagcacaacaaacgttcacgtcttgttattactgtacatgactctcttgttattgattgcccacgtgatgaagtagacgagatggctaaagtagcaaacttcatcatggaaaacttaccaattgatttcttaacaattaattgggaaggaaaagaaatgcgctacccaattgtagctgatgtagaaattggggaaacatataatgatatggtagactacgatgcggatactatcaatcagtttgcttcatataagggttacgttaaatacattaaagaccaagctaagtttgaagactattacaataatggactaatcacagaagaacaaaaagaaaaaggtattaagatagtccaagatgcaatagaggcatacaaacaacttcccgcaaattaaaaaaaatagtaaaaaatgcttgactatatcgtgagcatgtgttattataataaggcagagattaaaatctgtagtatgagagaagggagatagcatgtgttaaacttaagagtagacgatttagaatttcgcaagattaagattgtagatgacaatggagaagtggttgtacatgatttacaagaagagctacaagtaaatgagttcaatgtaagaacggctttcttagaacagcctgctaagtatacgtattggacgtctatattagagagattaaggatgtatcaagaaaactatgaactacaagctgagaaaaagaaagctgagctttatgaaccctcccgtatagctttaattaatatgggagtagcaaagcctacgaaagaccagattgaagcgcagattatgttagatgatgagttctacaagctaaaacaaagtattgtaaacttgtcatataatgtgaagcagttacaatatgtggtgaaggcatttgaacaaaggaaggacatgctcattcaatatggggctgacttacgtagggagtttgagtactcacagaaagtatcaatgccagacccaatgaaaaaccaaccaactaatggatttagtaatacacaatggaactcgtaaaagtaagaccagtgatagaacaccagtgataaaaaaataagtgataaaaaaaattaaaatatagaatggagaacttatattatgaactttcaacaacaattacaacaacaattacaacaaaactcaactgagcgtgaagtagtagactacccatctaatcatctaaaacacaaagaattgtatttccctaaatcagaaaatgggcaaccatccacgttaacagtacgtattttaccacccgctgtggcaggagaaaactataatgtagtagcacgtgagattttcttatcagcacgtaatcgtaatggtaaagacttaaagtctaactttgtgttatccccttatcctaactcagaagacattttagaacaagctttaattcgttggagtgcagaaaaccgtgttccaaatgcatacagccgtactgcaagcccacgccaacgtttctatgtgaatgtagtaaacatgattacaaatcagcagacagggcaagtttacccagaaacagaccaagaaggtaacttagttgttcgtctacttaagctaccacgtactgcttgtatgacaattagtgagtcactaagtaacccaatgttacgtccgcagttctcaccagatgtcccagaagaagtggcacaatatagctttatctcttctgctgaggcatatcctattatgattacaaaacctgcacgtagcaaccaaccaacccaatatggtgtgcaagtattgagtaaccgtccgttaggggcactccctcaaggttgggaatctcagctaccagatttagcttatcaagcaactccttctgtagagtacaatcgtaaatttattgagtactttatcagtgtagttgatggtgtggaacctgtagcaggtaatcaaggagggcaacaacaagcaacacaagctcctcagtttacacaacaacctgtacaacctaactttacacaagcaccacaacagccaaattattcacatcaagcaacaaatatgggaacacctccatcaattaatggcggatttaaccaaccacctgtacaaccaaatcaaggcttcgcacaacagcctgcgcctgtacagccaaatcaaggattcgcacaacctgcacagaccgcacaaccaaatcaaggtttctctcaacctgtacaacaacctgtacaacaacctgtacaacaacctgtgcaacaacaacctgtgacagaccctgcaactatttctgatgcagatatgccttttaacatgcaagagatgccagatgttgctcaaccaacacctgcacctacacaacagcctgcttctaaccctacaccagtacagcaaaatgtttcaaacacacctagtgtagacgacttgttgcaaagcatgatttaacaaagttagataagaggtttaacgacctcttgtctttattttataaactattcaaatagtaaggtataaacaagaaatggagtggacatatagatggcaagaaaaagacaaagtgagtcaatcgatgcagggacagttgatttaacaaaagaggtaggactaactacatttacagatacaaaattctctaatgtgtcagaccgattacctacaatgattcctcagttagactatattctaggtggtgggctaccatttggacgaatggttgaagtgtttggaaaaaactcaagtggtaaatctactttagcagtacacctaacaaaggtagcacaaatggtagacgtacctacggtatggattgacgtagaaggtacagcagacccagaacgtttagctgaactgggagtagactttagtgcaggtggagtgttcatggtagaacctaaacagaacaaagacggtagtaaagatactatcacagtagaacgtgtagcagaagagttacaacgtttactgccagtattcagtaagttgggtaaaccagtattgattatttgggattcggtagcacagacagcttctgagaaagagttagaaaaaggtgtagggaaccaacagcccggaattaaagcaaaagcaatggcacagtttgcccaaattattgcacctttaatgacgaactcaaaagcactatttattgctattaaccaagcacgtgacgagttaggtagtatgtttggtggggtagactctcccggagggcatgctttacaccactgggctagcttacgactagaagtagtcaaagcaagtcagattaagaacaaagaagtgaacgcatttggtgcagaggaagaaacttatgttgggcacatcctacgtgttaaaacagctaagtctaaagtatctcgaccaaaccaaaaagcagaaatgtatttgatgtccgattcagggcttaacttagaagagaatatcttccgttcatgctttgctactaataaacagtatggtttaattagtggaggtacatggaaagcttatacaacagatgcaggtcaagagattaagttcaactcagataaagcatgggtttcttacctacgttcagaggaagggcaagcagtacgtgacgagctattctgtaagatgatggttcgttcattcccacaccgttattctccatttgaaaatgaagatgtagacgtatgtaagattcctttatatgctaaagcaaaagagtacatggagtctcataaggaagaacctacccctagccccacacctgaaactaaagtagaagcaactgacgtgtccgatttgttaaaccaagtagactaaaacaatggggcgctcagccccttgtttactgtaaaggagagaacatatttgcgtaaaggactaacagctaacccattctttgagattttggagaagaatgaagataagatttcaagaagtaaagcaacaccagactatgagacaccccctgtacttattcctataaaaaatatgtttttggaagctaagaaacaaggcaagagagtacttatcgagaactctgatttaagcagtgctaattctgtagtgattgaattagcctacattggtaatcggtggtgcttaggctaccagaaggttctattttacggtatggaactaaacattccacataccatacacttctgtgatgtttacggagcttacggacacgatgctccaaaaataaaaagacaggtgaaggtcgttttcgagggggataacccttttgagtagagatatacagaatgaagaaaaagaaattcgtaatggtaaccgctttgtaacagaaacccatgggaaaggggtattcccaagagatgttgataggctgtttcacaagtactctaatcttcgttataaggtatataatactcataaggactcattcaaccaagagtctgcaagaaaagaccttaagagctatattgatgaacagtttatcaagcttacaaaggaatatgatattaatggagaagtggactttcccggttatataaaaaaagcgttaaacctaagagtacgtcacagctatgtaaaaggtcaatttagagatggtgccagagagcgtttaggagctatgtcagatgaagtagaaaatctgttaggggtagataacaaatcccaagctgatattgaagatgcagagcttatagatgctttattgactcaagcaaacttctctgatattgaattagaggtctttacacgcttagttaggggaaaccagaaagatatggatattgtagatgaggtatccgaagagcttaacgtctctaaaaaagcagttaaagatgctattcgtaatgtaaaagattatgtattaattaatttaggaaactaggtagtacctcctttgtgtctgctatattagcagtagaacacaaaggaggtattttttagtggaacaaaacaacaacactggtaagtatgcaccattcattcgtttaatcgtaatgggaatctcatttgtagcaacaggattgactacaatattcggttgggaacccctaccttttacggatgaacaaatgaaccaaggattgatgctagtattatctgtaggactagctatctataactggtacaagaacaacgctgtgacttcttacggaaaagcaaaagaagaagcaggaaaagaagtagttggtacaagacaagacttcaaaaataaagactagtaaatgaggggctatgcccctctaagctagcgtagtaaggagagataaaatgaaagtattcaatataccaaaagaagacctagtagctattgatgggaaggtattcgcagtagaaaccacagcagacggttatcatggtataacagagggacgttacaactttgaaattacaagtaaagacgaagatttgtttgtttaccccatattctggaatggagacaaattcgagagaataaacgattttgttgctagaacagataaggaaaaagcattctatgtaggtaacactacaattgacccgtacaaccaccctactttagaagaagttaaaagatatgatggagttactaaagaggagcagttatttgaagcatttaaatattttgtgcatgactatttttcttttacaaatacttttacattcttaactggtaaaatagacttattacctagtcctaacgtagttaaagttgagagcgttagcttagacagaaaaacagcacagatatttacaggggactctgtaaccttgaaagcaacagtcctacccgacaaggcttctaacaaagaagtgacttttgaagctacaggagacaacctagtattgttagagccgtcaggaggtagctgtgtagtgaccggagaaaattcaggagaagctacagtaactgtcaaaacagtagatggtaactttactgattcatgtgtttttactattaaacagtatatcgatattgttagtgtaaaagtgctaggtgctaccgaagttaacttaggagataccgcacaatactctgtcaagataacgccagaagatgctaccgaccaatcagtagtatggtctgttaataacaatgaggtagctactatagaccaaacaggtaaactaactccaataaaagcaggcaccgtttcagtaagagcaaccacttctgatagtaagtacgatgatttaactgttactattaagacagttatccctgttgagagtatcactattaaaggtaagtcaccaattcgtgaaaacagcaacccaacatttactgcagaaattacaccaccaaatgctacagaccaaactgttacatggtcttctaacaatgagtcattcgtagctgtagaccagtcaggtaacataacattagcaactacagacagtggtaacgtaacaaatgcagttattagtgcagtaacttctaatggtaaaaaagctgacttttcagtagaggtacaacctgagttagtatctgcggaaattacaccgaaaacgataaaattaaaacctacagaaaccgctgaaatagcgattgcatatactcctgctaatggctataaggaagatttaacatgggaaatagcagacccagaaataatttcatttgaaggaaccaccgtaacagcaattaaagatggtgaatcattgttagatttgaaagataatggtgcaactatcggattctgtgacgttactgtttcatcaacaccataataacaaataaagaaaagaggaaaaatactatggcacaagtaattaaaaatattgaagatttattaaaacctagtgttgttcaagtagatatagcagaccagttcatcgtaacctctgcattgtctgatggctacacaggaacagtacatggtaactatgtatacaaagttactaaaacagggacagactataaagttaatgaattgatttatgatgctaaaaagaatgaatacacaccttctgacgagccgattatcattactgatgacaacgaaatcttttttataacgaacacattaaaagacccttataactttgctacggtaaacgcagtagaactagttgcaacagacgtcaaagaaaaacaagtcttgcaagcattcattgcctttgcagaagaccgattcaaatttgcgaactacaactcattcttggcggacaatccatttgtactaggggaagcaactgaataacaggaatactaaaggagacctataaaaggtcttctttttttttgtgtaaaaagtattgacaaaacataggaagggtgtataataaaggtatactagaaaaggaggctccatcatgaatagaataggaacaaaagttaagacgatataccgagactacgacattttactggaagaggaaaatggttggtattactacagcatattaagcccgttaggtaaagaaatccatagtggctttgttcaagtagaccaaccattatcttcaatggctaaagagttacatgataaggtggacaaccactgtgtagctatgtctattgaagaatacgtatctggaaaataccacatccctcgaccagaagattttctaggggagggcgctaacattgatacggttaatcacaactaaaagcactcagggttctgtaatgaacttgttacttaaacgagcttatggggaagaagtagagacatttttcttagacaagtttaagttccctgatgtagggcaatacctaggggaggacatactgatagtatcaggttttgctttctatgaatcacaaagaaaagcaaccgaagaggcgctagccccaatggaaaacccttttagtaaagtgtaccatctagcaacatttggggatgtttaccagaatgacagtaatttcgtttcttatgtagacgaagagaacagcccagttaagcattttaacgagcttttaacggatatacaagcatttacaagtaaaccgttagtaagccccttagaggagctcctagagggaaataaggctatcatagaagaaacagcaaactataatagatatgagttgcaagaaaacacattaaaatgggttctactagttgatatgtttagagagtacctaccttatattgcagggggtactaaaaaactagaaactattctggaagagcaacacacaacggtacaagcgttagaaagttctatgaataactatatgtcgaaagtaataggtagaacttctgctaatgtaataaataatactgttgtatgtttttgctatgcagaacaatatgtaaatgagattgcacataaattaattgatttctacttgtcacacaactatacaaaagtaattgtttttgttggaagacacactaaaggtgatgacatgtttagtgttagaagtcacggagtggatgccggagagattgcctacaaaataaataaaggacaaggaaagagtaagacagctatgctttttctaggagatgcagtagctactacacgaaatacactacttagtgtactttctgatattctttaaataaatctgtgttataatgataatagataaaattttgataggagtgtaattttttttgaaaaataacaaacaactagaagaagtattagaacaactaggtaaccctaatgtgttaagagcagtaattatcggtaatttacaacgtaactttaacaaagtacatgtaggtaagtttaataaattagctaaagagtttgacttagagaaagaaacattgtattctttaaaagagcttgtagcaaagattacaggcagtaaacagttagaacctatctaccgagcaagtatgctaggtgagattgacttagacaaaatacgtgaggctatctcagatgatgaagaagaggaggataacagcgtatttgatattttgtctccctatgtggtagagaacactgcggtattagctcgtaatcgtgagttcaataaattacagcgtgaaggtgctttcctaaaccatctaattagtggtatgaaagaaagcttaattgacgaatggggaggcaaacgtagatttaagtatgtagatgccgaacctaaagttaaaagagataaagatgcaaaagacaaagagctagtgctatgcttgtcagactggcacattggtgctttagttaacaacatggatacaggtggatacaacttcaacatcttcaatgaccgcttagatagcttaatggaagaaacagtacgtgtagcagatgaacaaggaatcaatcatatccatgtctatcatattggggatattattgaacacatcaacatgcgcaacgtaaaccaagcgtttgaagcagagttccctgcaacagagcaaattgccaaaggtattcgggtagtagcagaagtagtgaactatctagcagacttaggttatgaagtcactttcggtatggttggtggtaaccatgaccgtttccaaggtaacaaaaacgataagattcataacgacaatgttgcctaccttgtattagaccagttattctttatgcaagagctaggtgcggtatctcctgatgttactctcattgacaaccgtagtgacgtgtatagctttaaagattctgtagcaggtaaacgtattaaagtatctcatggagataatgaaggtaaaaaagtggatgttaaaattcctaaacatattaaagatgaagtaattgactatttaattatgggacacattcacacaacacgtatcattcaagaagacttttcaagatttcatgtatacgtaggttcacctatgggggctaacaactattcggcagagaataacttacctacaacatctcctgcccaactactactagtaatagacccaacgaaggatactccacaattccgaccagtatttttgtaggaggtagtaataaatgattggaaacccactatattttctacttacgatgatgtatattgcagaaggcattactgctatcactaacaccaaacgtaaagaaaaatacatgattgaagatggagaaccaccattaccaaagagctcttacgtgttcttgtttattcaatacattttaagaatcctcttgtccatcgtcttaatttttgttgtaccagaagagtttcaatttaacatgacaggcttacttatttttgcagtaatgcttgccgttgttcctattgttgctaggctgattgaggtacttattcgagtagctattgtccgctacatgcagaagaagtacatcgaacaactaaaagataaagaaggtaaaaaagagactatctagtctcttttttgctatattgaataatgaggtgaaagaaaaaaatgaactttacagaagtaattagcccaaacggagatagctctttaatagacgtgacaaacccacctattttaattaggagaggtacattgtctatcaagacaaagatagacaataaagcagtagaaaaagctatttatatagtagagctagcagaagaaacgtcaggcacagatgtagtttcagtgtacaaagctaaaacaatcaatggtgtagtacaaaaagactttgttacagaagaggtaaaacaaggctacaaaagtactactttcttaggagatttagcccaaaaagtgaaaggtagcgatttacgaggtaaacggtatatatcaactaaacctccgttgttcctagctcctgttgtatttggtaaagatacgtttacaggtgttgaagagagaggattttatgagcgtgaagaagacagacatgtcattcaagatggtaaacctgctattcaatttggagataatacaggagtgtttattggattgagctcaattaagtgggaaagggtttatgtggatatgaatgacgtagcaaaggggtacttagctaacaagcaagtctggtttaacttagaaggtaacaatccacaattcaagagtgaagtttaatggttaaggacaatagattttatgaagaagatatacaagaactaattcttaataaaaaacgtatctttggggacattggacagagtgctatagtatttgaaaaagctatcatgcaaggtaacacaatctgtgactgcttaatattcacagaaaaaagaggagttatcggcatagagattaagacagagcgggactctacaaagagactaaacaagcagttagccgactatgaaagagtatgtgactttgtatatgttctatgccatgacaaccatgtgccgaaagtagaagctattttaaacagacataatcataaacatgtagggatattgtcttacacagagtttatgggagaggcaatgctcggtgagtataaaacctctatacgttcccctaagaagtccgcttatcatatgttaaatgttctttggaaggaggacttgttgcgtatgctagggactttccgcagatatggggacaggttagaagaaaatggggctaaagtgatgaaaacaagcaaccgttcaggtggtgtctcaggtctttatgttaagtccaccactgcaagacgtatgactaagccagagctaataaaaaacttaatcagtcgtgtaggcggtgaacaggaggctactagggtgttttgtgatgtatttattcacgatagaaaccacccagaaaaagcaatcaagctaagacactttaggagcaaggaaaggactatttttgatgagatacaagaataaaggtgcaaaatttggtaacattagtggtgtagtagggcgtaattacactggtttaggtgggcaatcaagtgggtctgaaactaaacgattgtctactaaaggatactatcaagtaggttttgtaaaagaatatagaaacttgacagaaaaagatattatgttaaaattagaatatgggaaagatttagtctctagttatatcggggtaaaagcagacatgattaacttgcgtaaaaaacaagacaaacagacgttagcttccttagataccgtttactatgtcagtgttggtaaagaaccagtaggtaagctttccatccgtgcgcagagacgttttaaagaagtagggttgacgtttatttaccttgagaagaattatgtgcagagaaaacttagaggtggtaccacaggcattaaaagctacactaagacaactaagtcccacacaaggaaaatggatagacggaagtctaacagagctaagacaacaaactagatggaggtaccatatgttaaaaaaagggaaacaatttacattaaagaaacttcttaatgtaattacaaacaaagataacctgctgttaggtgctagatacgaaaattctacgttagctgtagacgtacctattactactacttttgaaggtattgaaatagaccctcaaaaagaaacggtggcaggaactatatcatttagaccagtaggagagagacaaacgaacgcacttgctatgttaaaggactcatgtgaggcttttgggggctacggtgagttcttagactctactattgaaaaaccactgttaaacagtgactatgcagttgatgtatccttagctgattcagtgttcagcaacttacaggaaattccgtttaacatctatatgtcttcccctaaagtatattgttccacagtaactatcaaaggacgagtccacacacagtatacactagaagatatgactgcagatggtattgtaagttccttaatcttagtatttcgtgctaaaaagtacgatggggagactttgctaggagcttacaaaaacaagccattaaccaaaacagaagggctaaaactactacaattcattgctaatggttcagtgttagagcaagtggtaggcgccgtatctattttaggtaaagaggtggggactactttgttcccaatgtttgatgacgttactatgcgattcactctactaaaagaagttccatgggtacacatctcatgtgatacaggaacggtagcttttagagaagcagatattcgttcaatctctattgattcagcaagacctacagagtttaaggtatctattaaactagcaacggaaacagttacactactaattggataaaaaacaaaaagaagttgagtttttacttgacttctttttttgtgtatgttaagataaatacagttagagattataacaaagggagaggttaacatggaacaccaagagaaagtatatgcggaggcatatgtccatttaagaagatttagtgaacgattttacgtaggacagcaacgtagtatcttagcaatctaccaattaggtagccgttatgcaggttatgatattgaaacaagtgactatgattacatggtagtgtacatgccatcgccgtatgacttaattaagccagtaattgtgcataaattagttgcagaagtagacggcatgaagttagagattaaattcatgtcaattgcagagtatgtacatcgtattgaagaaggggacttagaagcattacaaatgctgaatgcttacgaccatcaacgtgtcttctgtaaggatgaccttggagtaggtactaaacaaactcgtttagttgattatatgaaggagttagaagaaaacagagaggcttttacctacctagaaccagagaagttatttagaggaataaacggtcgtatcaaagctacttatgcacgtatggaaaacagcatttcacaaggagaagcagagaaagcagttaaatgcgctgttcttgttcactactttatggacgtactaaaagtattggcttacaatgaccctatccgagaaggtcttgtgttaggtgagcttacagcagaatcctatcgttatgcgagagataacattggtacagaactgtctaaccaaaaacttatcggggcaagtaacttaatggaagtaaacagagctgttctgttaaacatgatagaagaatatgctttaccaaaatctactgtaggtcgttataaagaccaataccttacaggaagactactagatgtattattgggaggatactatggataaattatcacagattaaagaattagaagaaatttttgctaagaaaacacgggtaacagataaagtacaagaagcttctgctgttatgttaggcttagaacatgcatatgactttggtactggtacaaagtccactcaaatttctggtagtgataagactggtgtattcttcttagagagtcacctgtttgttcataaagtactaccttatggctttgttttacacgcagtagtgtctaagagatacccctctaatgtacaggataccgctaatgtagcttctcgtgtgtatgaattagaatacaacttacgggacaaggtttctaagctaactaagaatggtaaaccgctaagcttctctgagagtaatatcagaaatatgttctcaggacatacaagtgaagaaatcgtaaataagttggatgagctaggtggtacagacatgtactcatcatcttatgattccataggctgtattggtgacgagcaggtgtcaatggtttctcgtttcctagcacgtttgatgaagtacaataagattgagttaatctataagagtggtgtacctcgtgagtttgccctgcgttatgcagaggcagtagttaaagagggtgaaggtgtcaatacatggtacagtaaatctgcttcatggttaagtaacaaagaaacgaaccctgcaaaacacttaggtgtacctaaagccatttttaaagtaatctgtgagggctacctatcatggaacgcctactgtagtttagtcagaacacaacaaatacggttgtctaactacgatgagactgataaagaatacattaaacggcaacagttatatactaagttcggtggggtactctatagcttgtcccagtactgcaaagagttagacgaacaatatggtattaaaaaggcaagtagttttattagtaatgagtggtcttacatttacgaccgtatggtatgcggtaaggagtttacacccttctatgagaacagcatttgtgaactagctaagtcagctaacctagatttaaaccgtgctattcgttatgcctactaccaaacgtatattgagcagggaatgactgcctgcagaaccacaattaacatctataaagactacctacgtacttctagttacatgagtgatgacccgattaagtatcctaaagcgctcaagacagcacatgatgttgcagtcatgaactatgagctagttaaagacgaactgcttgcagagaaatttagtaaggctgtagctagctataaacacttagaaaccaaaggtggcagaggagaatacattgtagtgacccctgaaagtgtagaggatttagctaaagaaggtacagacttgcaccactgcgtgtttacctatgcaagacaagtagcggatagcgatactcaaatcttgttcttacgtaataaagaaacaccagaagagagcttagttacgtttgaggttaaaggaggtagcattattcaagcaagagggctgaacaatagagacctgcatctaagtgaggttaagtacttgaaaaaatgggcggacaaccacaaaattagatgtagtgttgggggatttactgattaaactttagaatataaggtctgtatagaccaattcataataaaaaactacactatttagttcatatttctaatcagagtaaaacagtttatttcatttagctgtaatgacctacattcgtttcattatgattcagctaataaagtgataaaaaccctacaaatacgtggggtttttgcttgtttcacttatatatgaaattttacaagatgttctgctatattaattacagaacctgatattcaaagggattgcaaaggaaaaagcccttatttcagaataaactaaactaaaggagtttgtaattaaaatggctaaaaaagaagtaaataacagttcggtgttactgaacttatacaacaataaactgttagtatcaaaggtagatgaagctttagatgagggtaaaccatatgactttatcattgctttttgtaaagagaagtttgattttgagattaacaaacctgcattgtctcgttataaagagaaacgcagagaagctatcgagacaggtactgatttagaatctctattagataaacgtagaaaatctggtaagattattgatattaaatctaaagaagttacttcattaccaagtgaaagttacgataatacattcggtcaggtagagcaaatctacaatgacgtagaggtactagacactatcattcaaaaagggtttgctagcttaaaagaagtggactatgtagaagcaccgttagcaatgaaagctattgaagtaaaagcaaagattaccgctaaccagttccaaggtctaagcctaacagggttaagagaactacgtttacgtcaatcagctaaagaacaagcaatgacagaaattattttacagtttatcccagaagagcaacacgaagaagtgttcaatgcaattgaagtagcagagaaagagttctacgagaacttagacctcaaagaagaggataaacgtatcactaaggctttgcaagcatctggtatggacattatttaggaggaagagtagtggaaaatttagaagaggttaactatcaagcactaacgctagaacagagtttacaggctttaacaaatggtaaggttcttcttgttaaaggtttagaacagcggagaaaactagatgtactagtaagactttttacagaaggcttagtaccagttacacagataagctatgatataacacctgctgatgggcattggagaaaagactattggcaaatttatgatttacctattaatgcattaagtacctatccatgttttctatatgattcctctacaggggctatacctaagtacatgataggcgctaacgttctttacacaagtaaagaggacagtatccaagatactgcattagtaatagctacttacaaaaatgaagaaggcaaatttttctataaactaagtagagatggcggtatctatagtgaagaagaattaaaaggaagataggcttaggcttatcttttttttattttaaattaaattggataaagctattgacaataaacaaataccatgttattattagtttaccagttaaatggtaatagaattaggaggtagtaagagatggcaaagtttttaaaagtactacaaggaatggataaaggagacaaggtaactgtagagtttgacaaagaggatgaaggtttcgcaaagttagtcctgtatgatgaatcagcacagtcaaaagtgactcgtgatattgtgttcattaacctagaaaaagggacttttgcttatggagacagtgacgatgaggaatggaacggattgctagaagacgttcgtaagttaggcggagctgagccagaaattaagacaggtattacaccgaaagaggaagaaaagatgacagacccttctgctactacacgggagctaacaaacaaactaattggaatgtttcaagagtttggggatatgtcagacacaacgttaaccttcccaatcaataatcgtgaagagttagcattagttcttgcttatggagacttagcgtttgaactgtacacaaagaactctactgttaatgagaaaaacttttacattacaggaggcttagcagaactaattggtcgcactgtacgtccaagtagctattcatttgctagtgtcgtaaatgcattgcaagatgtagtaaaagaaagagagtgtcgtaagtcattaaaactattagaaaactacgtaatgcatgatacagtaaatgccattgacccagacttcttacaggaagtattggatattacaggagaccttgacacatcagaatcaatctaccgtttgtatactgctgagacttatagaaagttagctaacgaacaatgggacgaagaaacactacacagcctagcggaagacttagcaacaactatttataactattcagtaatcttcattgctagtcttttaacagaagaagcaacatggaaaggtaaagaagctactgtgttctttatggatggggatacattagacgtattcgatattcttttagttcacattgcaaaacctttattagtaagtgtaggcttatcggatgtaatggatgaagtattagaccttgcatcaaacgaagtttacgaaatgtaccaatatgtaacaagcaatgaagacgacctcatgctatcagaagaagagattcaatctattgtagacaactgcgatgcttttgacgatgaagactcagttgcagaagaagctctaaaagaagaggaacaagctaagtttgaaaacgaacatgcccaagagttagaagacttaggggtacggttagctgtatctaaatctttagtggagacagcagaagcaatcttagacgaagtagagcatgttcaaacagatacaacagcttatcgcatggcaaaatttgcagttggtaaaggtaaacaccttttagacaagattgattatactcctgttaacgaacaagcattagaatatgcaaacagcaccttagacttgttcaatgaagaagtagaaccagagttaaacgcactagcccttgctagttcattagaagaaattacagcagataaagcagtattagatacattaaaacgtgtcttagcaaatatggagtttgatttagagtcagtaaccaagaaacaagaccctctacaagttatttactatgaggggagtattaaaatgctaactggtttaatcaaacgaatcaatgatgaaaaaagagtatatggtatgttacgtagcttacgtatgttgggtatttaccttatccgttctatcgaagtttcttatgataaacatggttactcatcttgtgactttgaaatcaaggttacaccagacaatcgggaacgtgaaactactaaagctatcctaaacttcttacaaggtttactaaactctattgaagacaaggaagacgagaaagaagaagtagtagtagaagaagacaaacctttagtagaagaagttgaagtagaagatgacgaagaagaagaagtagaagaagtagcagatagtaaagtgaagcctacaatggacgaggctaagctattggctgactggcaaaatggtgttcctttatatgagctaacagataaatatggaattagcgttggggctgtctactctatcttatatgcaaacggagcagaagttaaatcatctaaagtagctgaacgtgtagctcatgtagagtcagaccctgctaagttagcggaagtattacgagcttacaaagtaggtgtacgtttagcaagtatctatgaaaaatacgatttacacaagaacgggttgttctacttgttagataaataccgtgtaccacgcagaggtcgtacaaagaaataatagggctaaggtagtgactttcgagttgctacctttacctaataaaatatttggaggttcatcatgatattttttattgttgtagctgttattactaccatagcttttcaaagctacttttactgtgtggatggttgctttgactgggcacagctttttggtagtgtagtagcgggtttagtgttttctgtctgtattacaataccgtcactggcaatcacctttagcatggcaccgactcaagaagtgactaaagagtatgacctacactctatttacaaaacaagtgaagtgtatgtagaagctaaggaaaatagatataacattagagtagatgaaggcatccgctcggttagttcaggaactgctactataatgtctactatgggtgaaatcgagcctaaattagtttacacagagaactatatcactagtaactggtggacttactcactaggtattgtagggaagtctgaatctgctagctctgttatttacattgacaaagacacactagttgttaacgatgcagacgaagggaaaagcgctcaacttttagaaattaaataattagataaaggggcttgcataaagcctctttttgtgttattatatatttacagttaggagggttactatgtcttacacaaaagaattattagaagatagagggtatgactttgataatatgtccatgttagataagatgaacgtcttacttaaactactagaagaaccagaagttgtggaacattttaagaaggagtatcaagagttctctaaggagcgtgacacagatggagaatgataagctaaataaaagttttatagaggaagtactagctatcctagatgacattgacatgtccgaagaggtgctagagttggctaaaagaactactaaaggttcaaggtatctcacagaagaagaggtagcagaactgacaaggggttcagacttcactaccaaataacaaccatttttcttactaaattgacattggtaagaaaaaaattaaaataaagtattgacaattaacaacaattagtgtaacatgtacttatagagataaagaggagagagataatatgacaacagaaaacacacgtaaagtatacgcaaatttaacagaagaggaatcaatttttgcttgtaacctaggagacgaattacaagtattaagagaaagccaagacatttcacgtagagagctagctaaacgagctaacgtagaccactctacactaatcttgattgaacaagggaagagactacctacactacgtattttattgaagttgagtaaagcactacatcgagatttatctgttatgttcaacgactaaggagagaaatggcatgaagattactagagagtactacaactatttgtatcaaacaattgaagatagaccgacagaagagctacatctcttgcatgagggattgcacgtgaaagcagaggagctatttgctttagataacttccaaggtattaaagaagggtatattgtgttaaagattatgaaagaaattagagacgaaatcagtgatagaatggataagaaagcaattgctataatagaatcgtcttatgcagaaatgttttaccatgagaactacggggaagacagaagggtaaactggttatatgaagttgaagtggaggattactagtagatggtagattacagtggatttttaagagaatgggacgataagagagaagtatatttatatcagttccctaatgttaaaaacttacgtttaacaaagaaagagaagacttactgggcagatgtatgtaaacagtttgtaaatgagttcctagcagaagcttacaaaccaaaaattccccctattgatgtagttattaatggacgtattacagtaacagaaggtagctttaactactggatgaaagatgggaaaccgggagtagagattgaaattagcggtaaacttattcgagaagtggacttgctcctacacacagggcaaaaggtgggggacactgctgtcaaactacttgaagacgtattaaaacatgaagctattcactatgctttatggtacttgagtgaatcagaagtagtagcaggctacaaaccacaatactttgatggtactacagactttgagcgtgacctagcattgacaggaactacatctagcggttctacaggtgaggaatactgctataaaacacctagtttaggaatactacgtagtggacacacagctaaatgtactaagtgcggagagcttactgtaacacttaagaaggttttatactggtgcccgaatcacaacagaagcaacccagattcttgtcagggttttctaaataacgacttaggtatctctgtttacatcacaccgagacctgttaaagggaatctaaatgtagaagatgaagtagcagactacaaaggagctattcagctacctttcttaggtaaaacaacgattaaatcatttatataatttttttttagaaaaggtattgacaataaacaatcacaatggtaagattaatttatcgaattaagaaatgagaaggagagatttattatggcatatgtaacaaatattgatgttgtggcagagggcttagacttatataacggaaactatgtagtggaacgaggtcaagaggttacctttaagttgcatgtagcgacatggaacaatgaacctaccccagagaacgcttatgcaattattcgtaacaatggtaaagactacaaggaaaaagtagatgagtttggtaatgcagaaatcacatttccagtagacggacgtccagaccaagtgacaactagtatttttgcattaacttctggttatgaaggggacatgcctcgggtaatgtcagctatctttagcgatgaaacagaaattaaacaaactgtaatgaacgttacagcatctattaatggagaaccagttagccgtgaaggtgtatatttagaacgagaccaagtagtcactgtagatgttaaagcaacattatctacaggtaaattctgggaaggtgcacaggtaggtgtgtacaataacaatacagaatacttaggggacttagatgcagatggcaacggttcagtgacattccaagttaaagggaagcaaggtatggatacatcagctatttacgtgtttgttaaagaccacgaacgggaagctacgttaactgtacctgttaagtttactactacagaaacatctacagagagttctactacagaatctacagaacaagggagtaccacagaaactacccccaacacaggggagagtaacagcacctctacaacggacgtagaaagctctacaaacgattctacctcttctacagtagattctacggaaaacacagtagaagcctctacggagcaaacaggagctattgagagtacgtctacaagttctacaactcaagtagcaggttctacgagttctacagaagtttctcaagtagcaggctccacaagctctacacaagctactcatgctactacgagtacagaagctagcctaccatctactggtacagaggctgacacaggtttagttgcttttggtggggttgctttaacagtagctgttatcttggcagccaagaagttctttaacaagtaaatagactaggtttgtagccctcgttaatcgggggttacaaattaatttaattttttttagaaaaggtattgacaaataacaaccactagtgtaaactaggtttataagatgaaggagggcaaacacatgggacaagtaagtagacacggagagaaacgagtaagagaacgagtaggggttaacaaaggttcggtagaccgtcaatttgaattagcattagaacgaggttaccgacaacatgaactaacaggacgtttaaagaaatgggtagtatcacgagtatttaattctaagtacccacaccaatgtatcttgtacaacggtaaatgttttgtggtaagcagtgaagacacactagtaactgtattaaacattccaagtaacttgttaaaagacttcgcaaaattatctaagaaaagagggaaataaaatggatattatggatattggctttttagaagaacacaaacaattagtaaaagaacatgtagagcaagaattaaaattgatgcacccttttaagaagttacaagtaatgacagactggttagaagatgcaaatgatagcctttctaaagaagacctatactactttaaagacttgacagaagatgaactagtagaagcaatggatgctagtgaaatcgtagagttctactcagataacttactagactttattgattattataacattgacttagacggtctagcagaacaattaggaatttaattataggaggaaatgacaatgaacgaaaaagataaaaaattattagcaatgggtaaagtagatgtaattcaagaggaagattggttgctacaagtaaactgtgaagagtgtggatgggaaggttacgaagagggatacgatgaatgcccagagtgtggcaatgccgaactagaaatcgaatcaggaattgaaggaattaactgtgcacgttgtaattgggttttccttgcaggtgacgattactttgagattactactaaaggtaacccttatgaaggtgaacgtatctgtaaagattgtattgtagagttagaggagctaggcttggaggctgatatgtaatgggtaacctactatggagctacactaaaaaagaccttgacgatatggaagaaaatatcattcgactagagaaagagaacaagcttaatagagagtaccgaaacgagctagcagtaggagctatgttaggggcatttataacagtcctaggtctagttttctactactgtttacacttaggtattactatggggctagctactgggttacagctagtaacaactattatggttgtgttcgcagtcattatcattgttatcgggctttacattgtcactgcttctagtatggagtataaagaggttaccgaagaaatggaaaccaatcagaacttaatcaatgtatttacagaaattcttgaaagggagcgaccaagtagatgagtaaagaggacaaagtattaaatatgattattcttatctgtatgattattgtagctcttctggtagtattcagtattgtaactaccttaattgccctaccattcttcatacatgagaaagattggtttggtttaattcagtatattattacagatattattgttattgcagtagcatctggtgtaacttactggcagattagtaaggtagagtgaggtatgattatgtgtaacttaaaggaactaccatggaaagagattggttgggatgaggtgcctgtagacgacccaaaggttactgtttggttatgtccttctaataaatggtctcctgaaaacagggtgctagttttgtacagagatggagatataagaatgcaagcaacacaacgagtagacacaactaatcagaaggaactaagaaaagtaattgacaatttaacagaagagttgtatattttaagtacactaaatgaacaggaggaagtacaatgaataatttagaatcagcagttgatgaaattgaacgagtactattagggaacaaaggtcgtgacaccgaggaagtttacttaaacaatgcaattcggtatatcaaagaggaactaaagaaaaaagaagtagccccaacatggctaactgaatcacaaacagtattgttagattggttgaacgaattatatacagtaggtggtttagttcatgtaacagaaacactagggttcttagaatctactggtggcagaattaagtacccagaagcgtactctgcttttagtaacttaaatgagaatgaattaattggggtttatagcaacttctatacaggactagccctagaggaacagggggaagagtaatgagtgaaatttatgtagaaccatgtccgttttgcggttcggaagacattagttttaatgcgtttagtatatcatcggatgcctatgtattgtgtaaacaatgcaatgcaagcatcgaaatttctgttccgtgggataatatgaatgaaagagagcatgacaaagtttgttttgaaaaattagcaaccctttggaataaacgagtttctgaaagtaaccaaccagaactaaatgaaaatcagcatgttgtgcttgattggttgaaaaatgacatgttagataactcagatttttacaacactttatactcttctaggaaattgtacgttgttggagagccatatagaaaagaaagtatagcattcatgaaattaggagacaaagaattagcacaagttatccaagcatttagccagtgggctattgaacaggaggggatatgatgaatttctatgataaagtatacgaaattctcaactatgagtatccagagtggcaacgtttctttacaaaagatagaccaagtgataatgaacttagaaaagactttgcaattgatagcacaggcattaagtatgaagaatatatcatgggtaagtttgatgtagaaacagctagtggggatgttgcaatacatgtagtaggtgtacggagaagtaaaacagatttaggggagtaggtgtggctaaatggttgattactcagaagaactaaaaaggttagagagggagctagctctctctttaaacgatatgagacatgctagtattgctatgaatgagaagtactatgcagagtgcataaaacgttatgagaaaatcacagtacaaataactagactactacaagaagaagaagttaaggaggggagaagtaaatgtcagatttagcacaattcttattaggtagcttagtaggtggtgggattgtattaggtgtatacctcttagcagattggattttcagtaaaatatttgatattaaatagattggagagacaaaaaacatgcttggactggtttcaaagaaaaagtataatgaagatttaaagtaccaaaaagggtgtacagatatttatagagagcaatggaataacgaaattgatttaaatagaaatatagtatcaaaaaacgaaagattaataaaaattaaaaatgaactagtagatgaaaaactagacctagaatttgacctaagacattgcgaaattacaaaagttacactagtacaagaaataaaccaactaaaaaaagacttagagctggcagaccaaaccattaagcaatatgaacaaattatcaatagattggaggaaaggtagatgaacggaacaatgaagaaatatcaaattatgtacagagtgagatgtgaggagtacccattttatcaagaaatagatgcaattgatgaatgtgacgctattgtagagttctttaagattttggagccttataaaccagaacaaattgaaattatcaggttggagagattatagaatgacagtagaacaactggttttatcatgtagaaacgaattaagacaagtatggttatttgacaaaaagggtagtaccttaatatcttgtggagaatatgatagtgaactaaaagagtattttagttaccctgttaaatatttttacttagaaaaagttggtaatgaacatggtctatgtcgttatgacttaaatattacagtggaggtataaacaaatgaaatgcacattagaagacttaaaagaaggtactaaattacgttgtacagataacaaacgttttagtcagtggactacagataaggtgtacacggttcaatatggagctagatataattatgttgaaactgacggcggtaatgcaatacctgttaatggtatgcttagtagagtaaataatgagggtacaagccatgcaacatttgaaattgttaaggagaaagaataaatgaaatacacagagagtgatttaaaagcaggagctaaattgctttgtacaaaagcagtaccagaatactggactgtaggaaaagtgtatgaagtatcattaggcaaaaatgatatgttagtaattaaagatgacgatgaaaatgttgcattcacaagatacatgctaagatgtttaaacagaaactatgcaccagtacaatttgaaattattaaggagggagagtaaatgaaatacacagaatacgccattaaagacggtactaaattacgttgtacaaaatctggtacgtataaccgttgggtggaaggtgatatttatacagtagaaaatgaaggtatttttgatagtgacggtgaccatattgggaattactatatcctatactgtctgaatgaacaagattctaatgtaaaatttgaaattgttaaggaggaagaaaaagtggaatacacagagaaagacttaaaggcaggtatgaagttacgttgcacaaaagctacaccaacacattggactgtaggtaaagtgtacgaactatcgttaagcaacagtggtactttagaaattaaagatgacaatggggatggggcgtttacagactacatactagactgcttaaacggaaaccataagccagtagagtttgaagttgcagaggagaagcctgaacgacttgttaaggtagctgtgctccaagagggtactcctgatgcggacttactaaaagttggaggtatctacaaagttatgggtgacgcatctatagggcgtggggtaaatatttaccttgatgagagaccagatggatactatctacacccgaaccagtttgtctttgtaaaggaaccgtcaaatgatggagagaaagaagtagaagaggaattagatgccgaagctaagatactagccaagattgaacagttaacagcagaagcagtacaactgtttgctaagcgtgaccgtgtacatgaacaagcagttaacttaaatgcaaaagctcgtagattagaagagtctttggagttactaagagagtacatgtaggcaaactactacacttattaaggagatggaagaatgatttattatattaagtttttaggtgactttgaacctgcttggagcaagaataaactttatcgtgttcgtagggttactgcagatggcaactacgttattattgataacaatggctgtactagatttaccagtgacacagcacgaggtgtttttaataaggtagggaaagggtacgacactaacatgtttgaacttgtgtcagtagaagaggaaacaacaagtaaacctcggtttgaagtgggtgaccgagtaatggtttctactgacttacagacatctgggatagcatacaagaaccacctagccgccgacatgatagactacgcaggtaaggaagctactattgcaagtgttcgagggaagagcctacgctactttattgacattgacgatgtacaacaagattggtgttggacggaagacatgttagacaaggttgaggaagaatacgcattgtctattaaatgtactaaagcaaggagtacattctggactaaaggaactagctatgaggttaaacttacatctgatggttcgtactatgtccgtgatgatgacaaagacggttggggtggtgacaccttagatagtttattgagtgctattagccttagtggtaacgaatttgagttattagacaaacgacctacggaagctgaattagaacctgaacttgaatctgaacctgagtctgaacttgaatctgaaactaaacttgaatctgattctgaacctgagtctaagtctgggtcgaagcataccttgactgacttagagaagatagaagctaaaattactgccttatcagaagagtcttaccaattgttcactaagagtgaggagctaagtaacaaagcaattgaactgcaagatgagtcggtagctttagaggaagcattgtaccttattaagcaatatttaaaggaggaagctaaatgagtaccgatatgaaagtagttaagggttcttaccaagcagagaagtttgtaaaaacattaagtgatacccaacacgtggtgtctcattccatcgatgttacaactaactatcactatatcacctatgagaccactcaaccaacatcaaatggtatgacactgaaagatgtattagatgtattaactcgtggtgttgagattaccctatcaattcgtgataagaagtcttatgccatgttagatagccatacatttacatggggctaccacacagagtctagtgtagtctggaaagaagtagaacctttactaggttgtggcgtatttgggctgaatgcaggaaccgaaagacgattttttgtaactgttttaaaataatgattgacaactactatagtccatgctatagtaggtacatagataaaaaacaaccactactaggagggggaattatgataggagactttattttatggtttaaacaagcatggaaagaaacgttttgtgtacatgactacacgattagaggtgtatacaaaacactagacaatcatggttacctaaagtgtaacaaatgtggaagaattaaataggggggaaacaacatgaaccagagacagaagattaaacaagaaaagaaatggtttaaggagcatgggttcgatacacggcacccattagaatgtatcaactgtggggctcctttaagttggaaagatgagttacagaagaataatggagtttgtaatgagtattgctacatgatgagtgttggaatgtcaccatcagattttatttaaggagagacgactatgtttaaaaaagataaaaaagaagaaaaggattatagagaaggtgacctccttaaggctgtggggggttactactcaacgggtagtttgagtttaggaatcacatacccattgtacaaagttactgaggatgattggtacattatcaataatgaaggcaatcgagtaacattaaccgaaatggatgctataggtattgagtacactgttatgaaagaacctctattagagttaaaagaaggagacccattactagttatatctgaccttaagaaaggtgttcgaggcttagcaggcgcagaagtacagtgtttaaacattaccggtgaaatggcttcactagcaggtacagttgttcattatgataaagatatgagccatattgcaaaggggctgttcactgttaaagagaacgattcttattggtgtgtagcgattgctattccactaaataaagtagctgaccctgattttgcattagagcatttgcttgctacgttaaataaaaaagcctatactaaacgtctgatattgaatgagataaaatatgatttaaaccttcttcacaaagagctagatgaggtatccaacgaagtagaaagactaacaaagaatattgaaacaatttataatagcaaataggaggtacttaggatgctatattggaaggataacgagagttacaaagtcacacgttttagatatgacgaagacttagaggagttcttaaatgagcttgatagggaagatgaagtcattactatttttcatgatgggtattaccatattgctgttgtaaaaagaggtgaacacgttgaatgatttagagttagcattagagaaatcgattgtagtaaataagaacccaaatttttatgagttggcagtaggtaagaaggttatctataaagaagaggtgttagaggttgctaaagcttatacgaacaatcgtgtaaactactacctattaaatacacgtgataacaaacagttgagcgtaccagtatgggatgtagttccatacaacccatcagtagaagggcttgtgttaaaggatttgctagatgctatgcacattatcacacatgttactttatgtgcagttaacgagtatggctattctttaggagaaaccattatcgaatgttcagtagatgatataccagaagatgcgtttatcttgtctagtaaagtaacacacgtgcaaccagagggttacaatagtatggctattgattatgtagaatacgcagaataacctaagtagcaggctagagacatcgttcaggtgtctctttttttgttaaattaatttcaatatatgtattgacaataaacaataaataggttacaatgaatttgtaagttagctatgagtagacataggataggatataggataggatataggatagacttaggataggatgcaaaagtacttaggatacacttaggtttaggataggatacaagataggataggcttaggatgcgaaagcacttaggataacattaggtttgagatttaactataggagggaactattatgggatacattaacgagtttgaaacaattgaaggtttgttagacagtgagatttacgatagactagtagaagatggtttgccagtagatgaattagacagttggggtatggcatggagtgcccttagtcaaggttttgttctacttgatggaagagccaacccattcctatgtttcactagagaagagctagtagcaggctacgaacactttaaagaggaacttaacagtattctgactaaagatgttttggacagagcccacgaacgacaccagtatattaatggttaccatttaggggataacgacatgctgttcttggaggacaagagtaaagcctatcttatgttattaggtatcatagtaactgctcagatagtatacacagagagttttattactggtatgtttacaattccatataaataagaggttagtcttcggactagcctcttttactaagtagcaggctacaaaaccctaagtagcaggttgctaaatcttcccaagtagctggctacagaatccgctaagtagcaggttaccaaaaatcctctaagtagcaggctaccaaatccggatgcgccccgtatgacgatgcgtaaaagctccctagtgccttatgtggtgtttgtgccttatgtggtttttgtaccttgtgtgtcttatatggttctacctctatacttatatgctactatgaatcttaacttatgtaaataccttttttataggatatgtggcttgtgaagctaccttttttctctctatatatagtaggaaaaataaaaataaaaaaaaataaaaaagattgcacttttctattgacaaataacaaccactagtctattatagtgattgtaaggtaacaacaacaaaaatataaactattaaaggagactaactattatgaacaactttaaatttacctatgaggaactatctaacttatcacaggaagaacaagcaaaagcaaagaaaacccgttgcggtgtgttagcagtagaatgcttaaacaagaaacagttagaaaaaaagaaacctctattcatggtctttcttgatacgattgtttttgatagttctgacgatactagagggcaatacgcaacggctaccgtaccaacaacgccactaggtggtgggcgttttaaagttaaagaaggttggggacaattatctaatggaattattgagttagtacattaatttcaaaaagttattgacaactagcaacaactagtgtaatataataaatgtaagataaagaaaggaagttatgactatgtttagtagaattgaaaagtaccatagcgaactaacaaaaaaagaaattgctgtttttgatactacagctaaacaactaaacgatacacttacaatcttaaaagagcggttaggtactctcgataaagaaatggcttatgccgaaattgaaaacgaaaaagagcgtagcttgttagtattagatactattcgagttagtaacgaaaactacaagaatgttatatctgaaaacttgtatcatgctattaaagaactaacaatcgttttcgagttactctataatcagtaaaacttttttaaaaaagttattgacaattaacaaccactattgtaatataatagatgtaagatgtaagacataatcagagaggaagttattactatgacaaacactaatacaactttaaaagcagtggaacaatggaacgaaaaaatcgaggaacaacaaaaagtattaaatgagattattgttgctttctataaagagattgacttaaaggttaaaatggtgaatcgtggtttattaggtcaattatcagcatataacgaactaaaaggaatgctagcgggtatcaaactaacaggaaaagttattgcgccagataatgtgctacctatcacgacttataactttttagaaaacttgttcctaggtgataacgaacaacgagcttatgcaaaagattacctagaaagctttttaaaatcagtaaaataaagggaggaattttcctcctttacatagtaaaaaaatgtttgacaagttaaaagaactatggtaacatataattgtagtcaagggaggttagctattatgaataaagtaaagaacttctttaaagctaaacaatgtaagaaagaagtaaaagagattgtagctatacaggaaaaggcagtaaaggaacttgaaacattaaataataatttaaaattaatttcaaaaagttattgacaattaacaacaattagtataatataataagtgtaagagagagagagaaaggaagttattaatatgaaattatcagattacattttaacggggctattaatcagtatcattctattatggggctatttcagtattcagttaatgttacaggttattaactcattaggcggttgggacgttagaacttggacggtatgcagtggcttgttactagcgtatgttttcggacttaaaggaatttgggaacaaggcaaaggaaaaaacaaataaaaaaagttttgaaaaagttattgacaaataacgacaactagtataatataataagtgtaagagagagaaaggaagttattactatgacagaactagaatgtatttacgacaacagaaagagcttttatggaaaagccaacctagcagtagaggaaaacggtgtttctctttattcatacgatacaaaagttgcgacaatttacactaatggactagcaaaggttttcgggacatactcacaaacaactttgcgacatatcaaggaatttcttaagcaaaacggactaaaagcagacactaaaaaacaaattgaaaaagattatctataatagttgacaaataacaacagctagtgtaatataataagtgtaagagatgagagaggaagttactaacatgacaaaaacattagaaagcaaactaaatgaattttttattgacaacgacatagaaaacgaggaagtaaaggaagccttgcgaaaaactttcaatacaacttgtgaagtgcctttcttgcatgcaatgatagaggaagccgaaaacctagacaaagaatatttctacgatgttaatttcacggcattattagaaagctacgttcatgtttttaaaggtgtaagtgccgttagccatatcgggcaacttttcggaatgtacggtatgaatactttttatgtatctaatgactttcaaggactaatagtaagtgaaatgtaaaaaagttttgaaaaagttattgacaaataacgacaactagtataatataataagtgtaagagatgagagaggaagttattactatgaatattgcagaaaacgaattatacaccgttaaaagtccattaaatgaatgggatatgaactaccatgttattgagaaagaaacaggaaaagactatcttatcgacattgaggacgtagcagaaaatgaagaagagctagaaaaatatgaattaggtttattattttcagacttgcaaaaccttgttatcgacttgcttattgaaaatagttggaaaacaatttaaaaaagttattgacaaaaaacaacaactagtgtaatataataaatgtaaggtatgagacataaacagagaggaagttattactatgacagaacaacaatttaaagaagaacacttattagaggttacagaatggcgtagcggagggtacctagacactagtaaaatcaatcaatcacaatcttactatatcgagtcaagacctcgtgtatatggtggctgttatgtttaccaatatgtgactatggacgacggcacggtttacgaactctacagtatgacggcaagcactagaggaattgttgcgcataactgtcacgctagaaacgtattacaaagagacgtaaaacaatacagagacagcgctattcattattaagacagagggaacttttccctctttacatagaaatataataaaatggaggtaacgacaatgaaaactattaacatgacaatcggtaacactgacacggtaacaaaatcttttgacacggtggaacaagcagagagatatattttaggcaagttgagaggtacggatagaaagactatagatgtctttgagtgggattctacagggctagggcttagttattggaactttataacaaaagaacaagaaacttatgtattagaatactaaaaaagggcttgtgtatctgattaaattcaggtatactcttatagagggggcgttatccatcaatagagcattaaagaaactatactataaacacgcaaaggaattggacgaacaacaagcgggaaaacatatggaagctgttttcagtggtggttactcattggaagaaatggaattatttatgcagttacgaggaggaaagaactttatgcaaacggaggagattaacaacgcggagtatacaggttaccttgtgttagataatgataacattattgtaagggtggaacgtagcaaggtaacgaaagaaacctattgttatgtttatgcagacagtaacagcgatgactacactgcaaaatttaaaatcgattagttaaaaagtttacaaaaagttattgacaaataacaacaaatagtgtaatataataaatgtaagatatgagagagaaaggaagaaagaaaatgacaaaaaaagaaattatgaaacgttacttaaatgaaaaagtggactttgcggggtttagagaagaagtaaaaaactcatggttaaaagaccgtccaaaaagtgaactagcttataatggacttacacacaaatatttctataaattaagtgaagaagctataaagttagctggttacaagttcccagatagcgaccgaacttgtcaaacggtgtttgaagttactaatgaattaatttttgaaaacttgtaaaaagttattgacaaataacgacaactagtataatataataagtgtaagagagagaaagggagggttaacctcctttacatagcaatataataaaagtaaaggaagtgctaaacatgggaacattagaacaatttggttatacatggcaaggaatgaaagaagtcacaaaagaggaagcagaacaaagcattaagaacggggttaacacttttctattatatccagacaataccgagagtttaattatctcattagatgaactagaaacagatggtgtacgctttggaattgaaaagccagaacaattactgtttaaggtatctaacagttaccacaatacagaagaaatttactacggtgagagcgtggaagaggtagaaaagaagttgcatgactcactagagataacagccgaaaacctaacaggacaagaaatagaggaagattgggaaaactactataaaacatatgaggaagcttggaaagcaacttacaatgatattctagcacaattaaaaagtgaatgtactattgaaaaaatgtaaaaaaagtttaaaaaagttattgacaaataacaaccactagtgtaatataataaatgtaagatgtaagacatattcagagaggaagttattactatgacaatgaacgcaaacgatactttattactagcaatcgcagaaatgaacgaaacaacatcgggaattaaaggctaccttatcagtgatacggacaagttagacatgctagcttatattacaaaagagttagacagtagtgtaaactttaatattaaaattggttgcacggcaatcgaagcagtaaaagagagtaacgtagtattagagaaagtattaagagcttgtaacttgctaccaactgaaaagaacgtgcaaacggctaaaagcttcttagaggaacaaggttttaaggtagaaattagtaaagagttagcgggaaaaaatcttgtaaaattttcaatttaatggttgacaattaacaaccactagtataacatataattacagacaaataaagagaggaagttattactatgaacaacaacatgaacaacaatatgaattttaaccaacaacaaggacaaggacaatggcaagggcaacaacagaaagaagttatcttatatagacaaggtgaagaacttgtgaagcaaattctaacaaaagaatattcggttatcgggcttatcgtattaatgttttatttcatgtttggaatctttggaatctttggaggtgcaatctatattgctttcactcacaacacacgcaaaaacagcgcttggggtcaagttagagggtcattcatcattaaagaagaaatggaacaacaacaatgggaacaagaacaacaaggagggcaagcataatgaaacaactaaaagggctaacaattagggaactaattaagaaactagaggaagtaccagaagaaaacaaggacttgcctatctatacttttgaaaatggtaactctttgcctattaaagatatttcattatatgacgaaaacgataagcactcacaagaaaacccgttaagttttgacgtaatcagataagaacaacaataataggagggaacaactaatgtttaataatgcagagaaaacagaactaattactagaaaagacttacaaggtttttggctaccagaaacaacaacgcttgaaaagtggtataaacgaatttcaaaaaatgagaataccgaaaatgtttcacgtgaaacaatggttagtgtattgacagactacgcaaacgaaaacgaatttattttcattcagaacaatggcaataagaataaggggaaagaactagaaacagaactagaaaagcttgaagagaaaatagaaaatgagttcataacattatcagtaaaacaagtatacaaaattatgagagttttagaactagcagagttaacacttgaaaaagatacggagattagggagctagtagaggaacaagcaaaatttaccttggagaagctaactagtgacaacttgacaattaaagacatagaacaagcagaagcacatcttatcttgggtgtaagagaatggtaaaagtataagagtataagagtataagagtataagaaccagaatcagagtagggaggttagggctaggcttatgactatgaatagaaatagaactataaatcattttaaagtaaaggagagtaaagagagggtaaaggaagttaacagagtgaaagaactcaaaatcacacaagaagtcagagtgaaaaacatcaagaagagatatacggagattgtagcagagtatataagtaaaggttacctactacgattagaaaacaaaagacagcgtaacgaattacattatgccctaagcagtatagaattagaaaaaggagggaaagttatatgcttgtttctagtaaacgagtatagcaacaataacaactatactattttaaaagaactaacagttaaaacgaacaaacaaaaagaactctcttatatagaaacagaaaacaacctagctattatagaggtatggaaaggggtataagagtaaggaggtataagaagaatggtagcattaagctctatagcaattttagggatagcattgttctttgcaataataggggtagcatacgacaatgaaagaataagaaagaacaatcagagtaagagtaaggataagaacaaataagagtataagagagtaagagtaaaaacaaaagaaaaagaaaaaactattaatcataagaataagagtataagtataagagagaaaggaagaaaggaactcgactacctatatagctatacacctatataagagtataagagagtaaggggaggaaaggagaggaagaaagggagagagaggaactaaactactaataaaagaaagaaagaaaggaattcgactactaataaaaggaagaaaggaactcgactacctagaatttccaataatcgacttcaccagaaacccgacatagtggcgcataagtactttttaacaaataaatgaaattgttccctattaagtccgattatgcccgattatgccagaataaacttagttactctcttatatactcaattaagctaggatatgcctgattgctcttatacgctctcttatactcttatgcactcttatataactgattatgcttatactctcttataagggcttgta

SEQ ID NO: 10 - DNA, 139966 bp, Unknown
  Description of Unknown: VREML202-2 complete genome sequence
attgttaatatagcatgtttattaaaaaataggacacaactaggtgccctatttatattataacatattatttgctattacccttctataggaacgagttccgttagcgattccacagatgattgtagtcctatactgtacccttcacctaaacggtatttgaacagtacatttaacatgtctagttcaaccgttgcatctttatctgtttcgttatcgaacacgtaacgaacaaataatagcttgtaatcatttagatagtctgtgatacggtttgctactaagttgaatgtacgcatacgtaagtctaaactatccgtgtttaacttgtgccatgcactcgtagaaaaatcgtatagttcaaccgagaaactaattggtgaacttggacttactagagccttaagtgctgtagagatgttaaagttttcaaacacagtatttaatgcttggtcttctcctaggtcagcaataagcttttcaaattccatagcataattttcttcgataaaagttttaacatcgaatactatatatgcttttttatttgttatacttccatatactgtccatgtgtacttagttgggtctactgtagaggtttctgtatcttctaccagagtgcctacatagttgtaggagtcaatgttaggagttctagtacctcctttttcaatcttaagccagtcaattttaacagcaccatagtcattatcgtttgataattgatatagttgcagtctattagggtattctgcgtttactgcaggtactttaaatgtcccagtccatgtattaggtaaaccctctacaggatgtaaaaatcctaataaaactgtgcctgcattatacacaccaaatttatttttagtaggttttataccttcaatagtaactgtatacgtttccccaactctaaacggctctgacatatcaccttgatatagcttatattcactcgtgtttattgggaacttaactgtagggtctgcaaggttttttcctaatggaaatttacctaaataccaaggtgcccctaataaattaggttgatacggagtattagtttccccacgttcaatttttatatttctcatcttaagcgtaccggttgggttagtatcacttgcaactgtttgccaactcaagtataatactttaggtgccctcccttggtaattcatggtagacgttccttttactgttatccaagtatccctaggagcatccgcaggaagtcttgttgtttgcagtaaagtgtaacctccatcaagatatgcatagttagcaaatacttggtcggcattcccagtatagtcagaaccgatatacatctcacaagaaattgtataggtcgctttatcttctaggtatacactattttccccatcggtattaaatttatttaatctatctgacccatccatcaaaacagtgtactcccccgctgttataggtaagagttccgccagttcctgatttgaacgtattagcatttgttacaatcacgttagggtttcccgagtaatcgtaatcactaaagtctgtactgtttgaatataaagtgtggatattctttgttgcaggtacttgaatagaagctgttcttccatccttttcttttgtttgattatacatgtcagcacctgactctcctagagctgtttttaagtcactcatagagtcagtaggttttggtgtgtactcaagcaatgtcgtacttgctaagtggatgtaacctcttccgtggtcaaatgcccctgcaagcacatcttccccgtttagcatagagttattcgtatggaagatattactctctactacttgtgtacgttggtcagacaggttaatgttacctcgtaggtcatagtataaaccgttaaggaactctaattctgtcttattcgtcacgtctaggtatacatatgggctttctacagttgttttattcttatttaagcttgtgtctagccttagataaaatagaactcccgcaggtttgaaagccttaataatctctacaatttcaggaggaaacggtctatcaattgaaatatcgataattgcaaaacggtagtagtaacccattaaatggtcgtcaccgtttaattttgacttatttgtatagaaaatgtttctccaaggttcatatatttggatgactgcatcattgtcgttaaggaaatccaataacgcatcaatgatagcaggaattgtggctctttttagtaaaagttctcttataattctttttctataatattcgtcattccaatcatctttacgatatacaccaaaccagtccccccaagtatctaggtactcacctgtagctgtttctaatgaagaatgaatcttactagcaatggtctcctgctctgcctgagttaattcatagttcaacgcattaagcactgcaaagttggtatcatcatacttgttaggtttcttaccacgtctcaacagagggtggatatttttataaaagttactcacattatattcctcctaatttatatcagttctacaataacctctcctgcacgaattatctcttcgtccctaacagccatgttcccttccatgttgttaattttacagtcatagattaaaacatcgtcaatattcattataacctgaattaggtcagctaagattaatggttgtgaaacaacttgactatttaagtagtttcttattgtaagctccactctttcttctaatttactatttattctcgatttgtcacttatagtaacagttgcactcacttgtacattggattttattacagggaatacatccagtttaatgcctgcaggtctgtagtcctcaatagctacttttattttatctagtgtttcttgttttaaatcaccgtttaagtcatgtgcatatattctaacgtagcctacttcttctttgatataaactcctgcaacttcctctacttgacgtgtaccgtaatctaaggcttttatcgttgctctaccacgtgattccacaaatgcatgaaatctttttttaacggattctatactttcctcatcagtacctgttaaaaaatcaaactcattatacacggtttttaagtttgatatattgttaattacccgattgattcttcctttaggtatgttcccttttgtacctacagttgtacaataaacttctacctttgctgttataacaccttctggaattatgtagtcttgcatcgtttggaatgttaacgtgctaggggcaccagacaagctagagtcgaatgttgttcctgttggcacatacacaggggtctgagtaaccgtatggaactctagtgttaccataccatacgctctttttgcttctcttttcctaaagtcaaaagcatttaggactccttgttcaattccccataaaatattctctctacctaaaatatagtactgttctaactccatagaaacagcttcataaatagaacgaatagtagaaccaactgaaaaatcgtttatctcatgtgtgtttatcatagttacatcaattagtctacctagtatctctgaaattttctttagtctcattaaaccttatcctttctatacaataattagagcccctgagttatcgttttgaacaacaaactcaaattgctctctagtagactgtaaggttgctctatagttaccaacatatcggtcttcttcaatataatggttcactagaacgcattctgctactcgtgtatctttaagtactgtatcgcatacttctatactaattatcttcatttgttcaattgttgttttaccgaacattaagtgcaagtcactaccatactctgggtgcaacataagagaacccttagctgtcatcaatcttgatatagtggcttgcttaatattgtctgccccactagctatcttcaagtcaccatgcccattatgtgttattgcaaacacttcatcacttgttccatgattctcatagtaatctgtatcacttgtcatatccaaatctttacctaaagctaagcctaataagaaatccatatctctttggtttaatgagcttgtgttaatgtccaataagttaccttcatcaggtataaaaagggtgtctccaagtgtagctagatgttctaagttgctcatttttttcttgcatagtatctactatgtaagggtaaactaagtcgttgtactccgcaatttttacccaattatctacagagcctgtttcttttttgtgctatggattgcattgtatctccatatacaattaaatgctttttatatcgtgccatttactggtaaacctccttgtattaaaggaatttgctcctgaatatatcctagagcgacatccatagattgtaagtccatcactatgtctgtatagtcttttgctccccctaaacagtcaattaagtatttaacattttctctagtctgctttacatctgattcgttaatcattttaaacatctctggttcttcttcgatagcatatataagagcaaaggattctaatactacaatttgtgctagttcgtaaatacgtggagatgaaagcttaagcccacttttttaaaaatttgtaggttaaggagtctttagacaaagccttatttgtttcccctatatcgttatctctaacaatatctaatagtgtactagatattttattgactcgtgtatgaggggtgtagaaccttgatataaagtttggttggtcgtcaataacattggctacaacttcaccgctaatatcgacatttaaatatctaaaaaatcttagcaaatctgcggattgttctactttttccatgagctaccctccatatccgattattttttttaactcatttacaccatagttataggctcctgatgttactgcaggatttactgctgtatttggcataacacttctcctatattcatcatgaagtatttgagcaggtgttctagtgtcctgttgtgcattgtatgtccgtccaatgctaggacttacattacctatttgagggcttacttgagctctctcagagggctgtcctgcctctcttaacacgactaaacttaaggtgtaattaaataataatggctgttctgcagaacgttcaatggatagtccttctggcgctaaatgaacaacaaaatatttatcgtctgtgaaattataaaatttcatctctacactagacctattaccattaccaccctgttttgcgtaattatctattatttcttctaattcttttagtctgtccgccccatttttacctctgctgtctaccctgaatcctgttgtaccagaaaattggatagtttctatatctttaccaaagtcttctgttataatgtttgatttagttttaaatatagtaacacgatgtggcttattatatttatattgagttgggtttacttgaaatcgataccaacctttattcgggtcgttacctacttgaatcgcaatacgttttaatgtaccgcccataccatctgattgtcccatagtaaccgctcctttcgttccttaatatagtacaatatagtataaaaaaagagggtagcactaactaccctctcctattttgttttgttagtctttaggttcttctaattttgttaagcgctcttttatctctcttaattctttaagtaaaggcgtttctgtaggtttatctggttcaacggagtcttggtctggtaatggttcatctgggatgtcatcccattttacctccctaatttcttctacagtctctttagactccattaggggaatcagtttattatctatcttgtccaaccaatgattgtttacagctcgaatgtaagcttttaaatggaactgttcttcaatagttacttctgttaccttggttggtgtgtttgagttgttttcaaaattgttgtagtaggtactgctagtcgaactataacctaaaaagtagtcattcagggctttgtcaggattgacggaactgttaatagtcccctcaatctcaccatcagctactttaaaaggtatgtgaaaatcttccatctcatgcttaaaccaactaacctgtgaagctatttcactttctcgtgtatcctctttgaacaactcttccgagaaggttagctcaccatcgatgtatcggtagccagaaaagtctccgtgggatgcaggagagcctgcttccacttttattacaatatcacctatactaggggtagctccttcatgtgttgtactccattgtccccctagtttgccttccaagtttacctctacatcaatatatacatactctgtcatttaacaaaaacacccttctatttttaaaatatgaatcctaatgtaaaacctaaaactaaaccaatacctaaattaacgagctttacttttctttctttttttgccatctcttctacgattttctccacgtcttctctaattaaagccggaactttctccatagggtaattctctgggtctttaattacgtaagatgcgtataacattgatagatatgggtacatgtagttgtcacctcctctcataacttaatatagcctagctattcatttccgagaacatatttatcgcatccatcagagctagttcgttaaattctactctttgttttagctctttgttttcctgttttagcttatctacgatttcttggttgttatttgtaggaaggtcttccattttaggttggctaggtaactcatcactagttgtaggtttccataatactccctcaacttcttcaaaagtattagcctcatctatcagcttaaacatgtctacttctaattttttgtttaagtattcatgtattaggtttgtatagtcgtataaatttttaattacgctgtggttaacttgtaaggttacttgtgcatcatcgcttactctaactaattcaagaggaacggtctctaccaaacctactagtagaggtgctaccacttcgctaagcccttctgcagttaatggttgagcaaagtaatcctcattacctaccctaaaaaccaaaggtagatttttttcatagttacatgcagttaacatttcatctttttttggctagtttagcgctgtgtagtgccttatcttcatcgaatactagagagccatttgaatacttaaaatttaaggagtttttataaaaaaactggtcattatcctctattgttacgctgtgaatgttactattaccagacaggttactaccccaaccttctacgtaaccttcattatctacttctacgtatattgttctcatatttaccattcatccaccctcataagaactttatttctgttatttgtagtagctgttccacctttgtcatcattttcttcgtgaccccttaactgatagtcattgacgtatatatattttgtcttttgagatatagcatccctaccatctggtaagaagaacctgtgacctgtaccacttaaaggagagtctggtgcggtcttgtgaataaagaatgtaattatatcccataaggatagctcacctgtacttttattataagaactgaacgttaaagcccacccatttctacattcactaagttttttacgtggtactattatctggtctttgtgcatgtaagccttcccatcccataagttatccagtttagggaaccttaaatccccaccatcagttacagtaaatatagggttagagtcattgttaacatagaatccattgtccctcatataaaagtagtcatagtcctcccactttaaggagtttcttggtttacctgatttaataaagtgaactccctcacctccgttatttgatgtatctgtcgagaaccatatgccattgactgctgatatatcactgttgtttaaggatattcctactaaaccattctcctgccacttatctctttctatctctaataagcctcttagctcattattgttattgtcaacaaaggcattacctaaaaacagacttcgattatcggcatcaataaacatgatagggttacccggtttaacagtagctgttctagtaaacgtactaaacttatcagttacactcaacctaacttcgtatgtattggtattatctaattctattggtgtattttttactgttaccatactaccattagctgtaaaatttaaagcagtttctgctccataagtaccaacacctgctacttttgttgcgtaggttactgattggacagcatttttgtttacaccacctatagtgataggagaccatgtactattgacattaatatctgtagttgtctcaaagttatttctacgtgcgactgtaaagtccatatttggattttcatagggataaatatctacatgttttgtccagttagacttaaacccacgactgtcagttactgtgactattaatgtatctgacgtatggttagcaggtgcccctaattctacaactgtttctgcatttgaatagttgattgtttttgatgtaccacctaaagacacatcaattgttttcaaagtagagtaaccattagccgttgcaaagttagcagggatagtcactttgatattagacttaccttgaagagctacctgattgttacctgtaagcccgacagagacactacttgtgtcttcataagtaggggtaccattaatacttggtacatacttgtttttaggtatagttatatctattctctgccctgtccatggagtcctgtattgtactccactatatttacttgttacagttacttgacccccacgaggaatccgcatttggtattttcttcaatatattgtctacatctgtttgagttaatgtatacgacattgtgttccctgctgaatttgtggcaataggtatgttgagcccactaatgttaaataccccatcataagtaaagtttgcatcagaccgatagttacttagtgatacattgatttttctctcccacatttaaggttatcttacctcccgatgcttgtgcattcattgggggacaatcttgtatgttctttcctgactaactacatcatctaaccctatagtccagagtttaacctttccttgccaactagttctattgtttaatgcagtaaaaatagttttgttatttgctactgtaaaactaaacgctccactagtgcccacatcattaaggtttgtcaagtacgtccaatgggcatcattgtttaatgtggggttatctctgttagctacccaagcagttagattatgtttgaatgtggagctctgcctatttattgttattggtaagttccccggtaaatttaatgtagggacagggtttaacgaacttcttctaggtattctatttaggtctactgaaaaattaggtatagttatcgtaccataatatgttgatacaccgttatcagtaaaagtaacgtttacaaagtaactacccccaatagttattcttttagaaccatcattattatggttaactctccactctttagctagtaatagtttcttttggaaagcatttaacatagaggaagctttttctgtctgtgtagtcccttctacggtaactttggcatcaccgatagcgggagcatcaagtctaccccatttatccatagattgtaggtatagccatacgctgattgttgagtagttccctgcaatgttttgatttgcacgccactctaaaactaatctatgtcgggcaaaggctgtatactttgttccgtttaaagccatatagtctcatcgtcctttcgtgtccttctctatatagtataacacaaattaaccgaaaacgacttgtaagtgaagttttcggttaaaaagttgaattatttattcaaatgatggtacaaatgcccaacctctaattctttttgtatctgttactgtattcatagcaaacacagatactggttccatagttatacgtttttcagcctttagcattttaacttctgttacctgcccatttaaagtgaaaatacgttctatgttaccatcaatacgagaatatcctgagaactcttggggggtaatcattgtgtacccatctgtttgattgtttttaacagttaccccattaatatcaatcttaacattcgtattgtatatctcacttggatatggttgccatttaagaggtatattcccgatattatacataatacctgatataataacagatgcctcttgtccattctctacaaacatttctattttagtagaggtacttgtgggagtgaacacaagcttgtattgttggaaccctagtggtattggctgtgttgcatcttctatgcctaatgtataagttagagtatctccctcataaacccgaataccacatttaaagtcggctacaggattgtctgtagttaccttcatataaaaagatagtgaatactcaaggttagcacctatttcaggtagttctacagattgtgttaatgaagagctaggtcttttagaactaacaaatcccgaaccgaacccgaggttagctagttcttctgtttgggtagtttcaacaataccaccggtaaacgcccctgtcttccttgttaggtacccaagtagtagcttgtgacccttcctctatttttagctctctccaaaaagacctgtgtgtccatgactctactatagttttaggtaaaatatctaagtagccactagtacctattgtaaatgtttttgtaaaacgtctccaaacagttaagtcagtagtgcttccgttagccattactgcccaaccttctattgagtactccatccattggtctgtgtccttatcagggtagtttctaacaacaaggataggtctgtccttatcataagccaatgcctcttctttataatcaaagcttattgtatacgtttcaccagagttaacttttaatgggtggggtctattacctatttctttagtagaagaacgagaacctattgaacccagtatatgacttgtaggcttgtcatcttctggtggtaatatttcaaaactagcgattgaagcgccaccccatctaccgaaacctaaattccaagtagagttaggtaataagttcttccctactgtaccatcccagaagtctaacccagagaatcctaaagagtttttaagcatgttaactcctccggcttgttgaacagagaagttaaagctgtctttaagctgttgtagttcggagttagttacataaggggtaaaatcaataccgtttataccttctttgattagtcggttatagtcctcttttattgagtctaaatcttcataggtagctaagttgtctaggtcagtagtgttagcttttgtatcgaacacactagtaaaatcctcagaacctagtacagtatttataatgctatcagaagatattctctgctctgcctgtgctacccagtcagctaggtttgtgccatcttcaccccaaggtaaatctttaacctcttctggtgttaacgcaacccacccagtttctgagtctacccaacgcttaggttgattaggtacttttgacaagtctacccatataagcccttgcgatgggttagtaggggctgttggagaataaatccatgcgccttccttaccattaatctgaccttctatatgctcatcagttaacctccatgtataatctgaatagttatcactatctttcatagaggtacctacatacatgtaagtttttccttcaaccttttctcttgtaaaatcaagaccctgtaaatcgttagcccaagcagtgtatgttttgatattctgaacaacattgtttatgtcctcttgaatatctatatcagacttttttccaaggagttgggatgatacccacttctagttgaacattaccaaatcgaaactctttaacattagtgtcggctgactcaatacgtattaacacaccttttgttaagcctgttacttttctttgagccacaacacgtttcaaaccatcacttacttgtataggtgtactgttagagcctacccagttatccccttctaaagtgtagatagctaatctagcggagccaccacctattacctgcacattcgcagaagctgttagccactgaccttcttttacttctttcatacggtaatcagctaaaccgccaccagcaatttctttatcagaagtacctacagtataatcgaaaggttgggtcgttgcatcaccttttacagctaccatgctgtcaatgaactctgtggttgacgaacctaatgtgtagtaaccaacgtttttaatcatcagtctaggcaacatattgtctccggaagagaaccctacatagttgtacccaccaatattttgtaaattatcattgatagtatctgcagtttcttgtgccttgtctgctacattttttgctacgtcagatattctgtttagtaaagtagttcttttgtcatagtaattgttaaacgtatttcttaaagtagaaccaactactacagaagttgttgtcatgtcagctagtattggttttaagtactcgtctagtgcgttatatgctgttgtatgctgttgagaagacaccccaaatttagttgcttggtctaagtttattggatactctgttttaatctgttcccattgtaagagtatttgttttttctcattcggtgctaacatattgtcattcgacatgtcagctattgcgttatttgcattttcagcatcatttttagcattttcagcatcttgttgagctttcttggcttgttcttctacttttttaatgtattcctctaaagcagtttggtcaccttttatgtcttcccatgaagggctgtaatcagtagcctttgtacctgcctcgaatttgatattcacagagtttgctttcttataacttactctagcatagactgcattctcaggtgacacatactttttactaaaatccccagagtctgccacagcttccccagaaataaatgttctatttttatcgtaccagtctgttataatcatgtttgtgccagtgttaccgtaaagtgtagcaatatatggtgttttttgattaactttaatgtagtctgacactactgagttgtctactgcagtacctacagttccatcattctcgtttagcaaacctgctgtctgtgtctttataacaaataagttagttccacctaatgttagattgttaatagaatcgtctacaattcctttaacctcactagcagttactttttgactaatttgttcagcttgtatttcgatttgtgccttatttgattgtacaccatcttctacagtttgtactctagtagctagtaaagtaatagcttctgacgtttgagtaatgtttgtttccattacagatattttattaccataggcatctagctctgttttagctgagtccgttacttcttttagtaaagcaatcttacttgcgtaatagtccgagaatgtcgctctaaggcgttctccatctactatactagtttcatccatgtctttaaacaaaggctctacaaacagctctagggctttgtatttagctgtatactctgctgtgtctactgcgtacttctctgcttgtgcaattgttgtagggtattccttaacaattacatcccattcctttttaagttggtatttttcagaaggtgtcagcttattatcacttgctatatcagatataagtttgttagcattatctgcatcaatcttagcttgtgaggcatctgccattgcttgtgttgcatctagtgatgcttgggatgcttttttcatagcctctgtgataccgtcttttagttttttactaatagagtttagtaaagctattcttgctgtatagtaagaattaaacgttttgcgaagtgttgctccatctactgagctagttgattccatgtcagccaatataggggtaacaaatagctctaatgaattgtacttagcagtgtagtctttactgtcaacctcgtaggtctctgcttgttcaagatagcttggatattcattttttataatatcccattcttttaataaatctatttttttcacttggagtcaacctgttatcactagacatatctgcaatcactttatttgctttgtcagcatcttcttgtgcttttttaatcgcatcagacatatctacaaaagaactgtcaatcatatcctgaacttctgtctttgttacttttgattcaactttacctgctacaattgttatttctgtagaaagttctgatatttttccattttgttcttctacaccattagctataatctctaattgaccatttgtttccttaatctgtatagacaacccatttagtttgtcatatacatcggataggtctacatcggctgtaaacagtttcccttgtgaatagataccgtcttttcgtacttctaaatccatatccccattacgtaaataaacgaacccctcattgttgattcctagctcacttatttctataccaccatcaatattaatagagtcttgttttcttaatttaactctgccatctggtgtcatttcaaatagtgtgcgccaatcctcttctttgttcatcatagaagttctataagtaccatctgggttaatatgaattagtaaatcgtgcaaatctggtttgccatcatcatcaagcaccccttgatgcttaaacagtacatttggtgctctacctttcataggctctattaggtcaccattattatagtatgatgtctctaagtcctcatacttagtaccataacctgcatcagttgtagaggagttagctacttcttttgtatcaaaagcaataaatgatttaccagaaaaagtaacgacacgtcctccttctccatcaacgctatcatatgtcaatgaagggtacaaactaaattttttggtgcatatccccaattaactctaaatctttagggtctgaatttgaaaattgtgttcttgaaagctgtttgcttacatcgttattattataaacactaattacaataggcatgtctttatcggaattaataaaaccaactaatactactgttcctactgctatcgggttaacctgtccataaggctgtccaacgatatttctaccgccaaattccataggaagtcttgcagagaaacgaccctcatttgcataagaattttgaaatacttctttgtgctgtaaagctagcaagtctactgtattatatttatagtttacttgaattacttgtgctaatagtagcgtattaatttgttgtccttctttatatactcttttaatttctgagcctagacctgcttgaaatctgcgttttaccaatttattcatcctctcatcatgtgtcctcattatctattatagcacaataactaaaaactacctatacaaaaaaaaataaccctaaaaatagggttatttatatctacgtacatttccgtcaaaagcgctccaccaataacctttagacatgtcgacaataacaatacctgtttttggggactcatccatgttaccttttccattacaagagaccatcttgccctcaccacaatatatccctacatgactagctctgttaaaccaaactaaatctcctaccttcatcttatcaaatagctctaaagacttctgacctctagtagagatagtttgtaattgattatcataaagtagtgaacgagtagtaaccattctagccccaccagatagtgatatgcccgcatggtagaaacaccaccaaacaaatcctgcactgtctgttgctataatgtcttcctcaaatgggtctttatctgtattagctccaaaattgaaggcagattggaatgtggactctgttttcgagtgagctcttccccatttagttgcttctgtggcaatgttattcccataaagtattgggagctttttaacttctacttttggtttcttttcaacaactgttttagtttctacttgtttaacaacttttggttcttctggttctacaggagcgctacgcatcatacgtaatccgaatggagtagccatggctctagcaccaactgtcttttttctttccagaacctgagccagatttatcgtcccagtctatactacgccaattgtaccctccaccattcataattttagttgtttttccagttacattattttttatagaaaatacatcgtataaatgagaagggttttttataaagtaaactcccgcactgcttgtgctccaaccttgccatttacctttagacacctcgaagtgggcatggtctcctgatgcttgtcctgcagttcctgagtgccctatcacttcccctttagctttcttatcccctactttgttgcttgcccagttgttgtcgtgtacacataatagtgttacgtaagtaacgctaccatctacacatttaacaggcttttgagattgccatgcaacccctgagtaagagtcagtgtacacacattcacagtcaaatggtgcatagtaaggtttatgaggagtaccatctgaaaaatctattgcaagtgctcccatgtggctgtatccaccattttctccctgagttacattaattacgtctaatgggaataccgctagctgagttcctgcacctgctgtgtactctttacctgagctactcccactatcagagcctccatcatttttactgtttgcctctgcttgttcatctagtagtgcttgtaaggttttctcacctaacatacctccggagaagtcctcagatttacccccataaatgagtgaatctatcatttcctccgttttgtaaacctctagtgactccaagagtggtaatgtatccttgtgtataagagaacgaatgttctactgattctatataatactcccacaactcaccattttgttcatcttgaacaaacaaacggttacctaatctatatttagggtcacctttaactacaatgtccccactgtagaaattagcgttttcacagtaccaatttgctagtcttttagtaaactcagaaacaaatcgtttgtctgaaccagtgacggttgaactatcacttgggttattctccattatttcttcatattttagtttacctaagttaccttgcgctttgtattcactagcaatagacgtggcttggttaggtatcaaattgaagtagttcattaatttctcttttatgctagatactcctaggtttttatctaacccattaaggaaatccctaactgcggtatatgtaggctctaccttaccgttaccctcttctatattctcctcggttattcctgtaaatttagaaaaatcttccttacttaatgcctgatttgtaatatagtggtctataattttatctgcttcgttatctgttatacgtctatctacttgtgttattgatgttcttacattacttttttttaactcttagtacatcaacagggtacccttttagatagtttaagacaagagcgtactctctgtcaaacatctgtttagctgttgagccatcgctctctttactatcattatcactttcgggttttgtgttagctttatctccactgttactcttatctataattgccccttctaaatacctattaggtacttctagtttcttataaccatatttagaaactaaatcagggaatacttgtggtttagaaccctaacatcatagagtcagtcccatacaaattgttaatagatatgttaaatatagagtaagcttctgtatcgttaactgctacagattcggatattacttctgcagatgttactgtgtaggtttgtaattttttcccaatcagatttatcaaatggggttctacgcataatcattctgcatttcccctctggtgttgcatcgaaatacaattcgttaaacggtttagcggttacatcgtctataagttgttttaaagaaccttcatagtttatgtaaggggtactatctattagtctctccgcctctgtccaactatctagttcccattctaagaacttatctataccttgaccattaaaattaaatttcatatattgtaaaaatcttttcattaggctttctgctatttgacttgcactactaccagacatttttataccttcttgtgcatcgtcaggtaaccaacctaagtctgtcaaaactacacttacttcctgaataacacctaagtcgaactgcattaatgcctttgcaaaagactgtcctgttatcctgtacatcttagagttctctccatagtcaccctctagtctgacctcagatattaagccaactagtagtacagggttatctgattttttagtggaggaagtatctgggtctattttaagaataactgcatcattagcatttagcactctatcccaatacacatcccctgctaatacgaaggagaagactgcactatcatcttctaaagcattttttgtagttaaactaattacagactctgccataaaattattgcttaccttctctgtttcaccgttattgttattacgtccagtaagcccatcttttgcatcataaactatatggtagttgtctgtctctgtaaaaaaagttaaatcaaatctcgggtatcttaactctactgacattataaacctccttagagaaaagtagagacattaagcctctacactctcctgtattcttttgcgaagaaatctgtgaaggtggcatcgagtgttttgctgataattcctgctgacttatcaccaatttctctagctatactatcacttgttcccccaccttgtatggtgacattaactgatacctcatttgtatttgtcatcgtaggagctgaacctgattgagctcctcctgttgcatttattttagaaattgaagctccccaatcatgaccagaaccgttacctgttaatcggaagttttgggctgtttttctagtagcttctgctaataaacgtggagctgttggctgactaggatttataacatactcatcttgacctgctacctctcccagtagcgcatactctgggctagttatgtgtccacccatcgctctagttttattaccagtaggaccccatcctgtactaccgttttgataacggctatcccaagaatttaggtcatttttccaattactattattaaagaaagctagcaattggtcatacccgctcattatgttgtcatgaccgtctactttgtatgcatcaaaagtactttggacatactgtagcaaacctttagctccgccattgccattgaagttgttctcatcaattatctgttgaacagcactctcgtcaccactagactccgcctgaatcaatctaagtattgtatctatttcatcgtcagaaacatctactcccattttcttagatgcttgcctaatggctttctcccagtctcctccaaagtctttactagaagcatctgaacccattccatcagaagaatctttagagctccctgagttaccgaatataccgttttgattttttgcttggtttagtatacgttgggctctatctaataacttagaatagatagagagattggcggactcttctgcgttattctctgcacgtgttttctcagataggactcgtttgttagccgtgtctctggcttcttgtactcctgatttactctcttgcccagaagcaacatcttgccctgcagttaagtctgcttcttccgcataagcttcttctcctccgaagaatttacgaacaccatcaacaaatttaccgcctagtttagaacctgctagagtacctcctatggcgccgatacctccaccaatagctcctccgatacctgtaccaagaccgggtgcaataaatgtaccaatcattgcccctaacttagctcctccgatacctccaccaatagctccaacactctcccctaccgcctttgttttatcatctgcggttgcaatatctagtagagaggaacctatcgctagaggggttgcaactttgcctaggaatttacctgcttttcctaagccaccaagaaccttactgcccattccggcaccttttagtccttttgctccttcaacagccttagctccgacacccattgcggagtccttagctacactacctacatttttaataccttggaaccatccgccagagcctttacctgcagagaatgcttctttagctgattttaaaaatccgccccctgcagttactcctccacctgtactaaaagtagaacgagttccttttttgattaaactagataaaccaccaatagagcctgatgtggctagtgaaacagccatagctcctaagcctgctcctaacgcatataacgcaggaggaagtgctcctaatttagagttagtttctcttaagatgtcccccatatcgttaatctgtgaagcttgtttctctgtaacagcttctgaacggttagcggttccttctttagagtttgcatagtcttctatgttcttgtcgtatttgccttttcctgtagattggctttcattcattattctgtctacgttatcctgacttaaaccaccgttggcataagcctcccaaattgcatctatttggtcattcttagcatctgtaccgaatagttcgtgtaaagcactaccgaaagcatacttctgagacttttcgtcaccgggaactgattgttggacactgccaataattttctgtaagttctctggcgttgctccttgttcttgcatagcttttaagtcgtacattcctgctagtccttggaattgtgtccctttacctaaaagtaaagatgccttattattccatacgctaccttgaatacctgcagataaacttgacattagttgtgctccttgttcaccttggacagcacgcttacctgtttggtttagcattgttaacattgccatttgttctttaagctcttgattacttccgttacgaccagtaaagctttgctcacttaatgttttaagagcttctagttgttctttctcacgacctgccatccctgagcgctgaatagcacccaagaaaccttcttgaatattcttaatttggtctctaccactaatagctccactcttcatttgactattcataaagtcacttaaagtctcattatctactggaactgctcttgaaccctctgctaaggctcttgtacttcctgctaagtcctctttacttgtaaacccaatattacttaatgcatcttcttggaattgtaacatgtcagcgcctttatagcctaactgtttctcaatacccatctcttgcatacttttttcttagtgcacggaaatcactagtacctgtacgttgtcctaaagaaatagatgcatcacgcatacctgcgttagcagttgctccttttgcgtataaaccacctatggcggcggcggtacctcctagcatagccattgatatagaaggcgcacgctcagctagaacaccacgaatactctttctatcagcatctacttttatatcagatgcatttagtgaagcttccttagattttaagttctctacagtctctttaatagagtctgctaggcgttttctagcttcaatttctttctcaatttcttttatctcagcctgaatactagtttccctattcttacgaacttgtctatctaaatttgtattacttctagtctctgctagttcttcttgtctctgtttatatcgttctcgtagctcttgctgtctgctttttattttctgcgcctaggctttcaaatacaccagtacgtctaaggtcacgcttcatactctctgactgattgtaagtcattcttcctgttgcacttgcttggtttgcacggtggttaaccctagagttcaccctgtttagctcctgttgtgccctagagatatttcttattgctctctcttgctctgttagttcatcacgaaatgctttttgttgccttaatgtactagcatttatgtagttagggttagcttgcattctagcatgattttgaaattctttttgtgtcttgttaaatcttctagttagttcttctgcatccgatacagcacgtttatatgctgtcatatctcccatgctttctgcatttatcttctgattgtcaaaagctctatctagttctttttttgccttgataagcttttgcatttcctcaacagctttatcaatgtctttctgacttgtatggaaaaaattctgggtgccctttgcactctttgaatcaattttatccattaacttgtctatttcattaagttttgcaacagcatccccagtcattgcctcaacataaaaacgataattgttgctcatttccacacttcctttacaagtaaagggcagggaataccctacccttaaatttgaaattcgtcatctaatgatgttggctcgacatctttgttaaacaaatcgatagcctcctgaatatctccttgtttcaactgtgagttaaactctaggttcttacgttcctcttctaactcaattgatgatttctcttgccatttgtttccaccatgtttctcaatacgtctagcctcttccattgcttttttaacattgttagcaataagttcgttaatcgtatcttcttcaattgttgttccaccttctgcacggatagcatcaacttcttggcttgcctcccaacgagctttaagtttagccatgtcttcctcacttgtgatttcactaagtttacgagcaatttcttcctcatcgtcaccttcacgaattggagagaactcatcatgtggtttatcataccatgaatcgtcatagtcttggaactcactttctaactgcattcctttagctagtcgttcttgctcttctatgtctctttccatgttatataaaatccactctacttggtcacttgtgagatttttgccacgcagggtcactcggtagtaccttgaatttttttcattattgcccatagatttctactatagttatttctaacgagggcttttattccacctagttctttaactctagtatcgaaaggagtttagccattcaccatagtcctttgcgattactcctaatacatataaattataaatttttttcatcatcagctaatacttctggtacctctaccccacatactcgaatagttgctaacatttggtaactttggaaaataaagttgctaactgccattcccatgccttctaaataggcttctcttcttgcctgaattttaccgttttcgataatattaggtgcttttattttaatatcaaattctaaaccatattcttttaagttgtaatgcttagaaaatacatcattaacacccgggataattctatctaactgtttacgttcttctgcatcattgtaatatttcaaaatatttacttcttcatccgtcaagtttttctccacgttgcaacttttctattaattgctcacgtgataaatttggggtaggtgtaaataccttttcattattttctgtcattattatttcctcctagtttactcataaattaatatagcactatctttattataccacactatctagttatttgtatttatagtggcaaaaaaaaatagacccatatctgaattaggtctatttaaacttatactaattaatctattgttaagttttcttctctttttatttcttcaacacgtttcacaacatcttcataaataactggtggtacattttctatgtaccctgcatctctaattacatgttttgcatacaattctactaaatatggatatttcactaataacgtcctccttaagcttttttattcaatgaatatattataacataaaataaccacccatacaatgtgggtggttaacattattgttattttactttagctgaggttaggtatgtgaattgggttgattctgatgtaacttcgttagctgtgaatgactctgagtaagaaattgcagagcaaccacgataagctactacgatttctttagttaaattgtccatcattacgatgtcaataatatcacgttgcaagatgtcttcacctaacgctgtaattcctaaacttgctaagtcttcttttttcatacgcatacgttctaaagtaattgtaccttcatatttcaagtatacgtgttcttgtggcataatactaccgatttcatagataccttgtgtaccatattggcgctcacctgatgcagattgcgcacgaccgataattttattaccaatcattaggtaaactgtgttacctgtgtggactgtttgatttccaacactagccatgtatatatcactcctatattttattcattatgtaagaggaggggcaactgcccctacgctctatgctgttaagatttgttgtttgtatactaactgaacagtaatcttattcaagctacggataggcattacggtcatactgattgatgccacgtcaccttctaagacaacttgtacttcttccggtgtgtaatcttggatttcacgagcacgttttttgttatctaagaatgattggataaagtttttgattaagcttgcgcttgtgtcaatcactttagttccgatgaagttgttatctagttcaattttcaattctgaaactaagaagtcgtttgcttcaccaacagacatttcatttttaactgggtcagatttgtcattgtaggtagttacgtcttgcactacacggaatgcagttaaagtacggttacgtacaaactcgatagagattactccactttcgtttaacatgtctaactggctactttcaaatacacggtctacagatgttacgttgaagtgtttgaaagtgattgcttcaccaacttctaaaccacttgcaatacctgcaatttgtgaagccatcatgtaacccggtaatttaagcaaccgtccgtcatccattttacgagttccagagaagcctactaaagaagctctagggtcacgtaggtttgttgcacgagtaatgctttcctctactgtttcattagtgcctccaccaacgataatacgcattgggtcaccattgtctgtacggtctttaacaaaagctaaagcctcagaatgaactgcctgtttatctgttaatggtactaagtagtaaccaccttcattagctagtaatgggaatttattagcccaagactcaggagcagttccgtcagaaccacctgttaagtttgttaattcaaagtcttctacaggttttgtagcatctacagctacagttacatagtcattgtattctagctgtttagcaatgtctcctgctaaagctcctacgaatacagcctctgtcttaacatctactttgtctactgcctctaaagcatcagtaggtaagtttttgtcacctatagggaagaatttagcctcccaatctggtaaactattgattgcactaactaagacatttgtctcagagtaaacaccttgacctaactcatacttcattacttctgttgtactttctggttcagcacctacatttaaagttaatgttgttgctttcttactgattttatcttgtgcaattgtaaagttggcttgagcttcactacctttatattggatagagaaaattttacctaagttatcgaaaactttcttataaccatctttagaaaatgcaacagtcaatctttttgtgtgtgttaaattgttgtcttctaatgctacttgaatttcatttgcatctaccccataaattgttgaagcaaatgttaaaccaccttttgtaagagttgcgtttttagcatcttcaacacgaactgctaaaatgtctcctgctgatgcggtattaacgtcagatgcattccatgctaactcaatagcatctagcaaatctccactacgtagtacttgtttagcttgttgataattacggaaacgataaacagtatctggtttaccgcctttagcagagccgactaacattaatgttttgtcagagctacttgatgccccaccaataccgcttgtgtctacggtaatctcagtatgtggacgtgatactttttttcttgggaattgttctacagccatttattatttaacttcctttcctatatacttttctaaaaatggaacaaaatcagcatcctcgtgttggtattctctacctgccattagtgctctgaaacccgctacctgatatttatttagtccatataatacttttgcataatctaaaaatgtatcgacatggacataacctttaggttttttaggttgctcctttttaacttctttttttactactttctctgtttctttagccactaggatttcatcctcctttttgtaataatctctgtgattctttgttgtaaatcaaatccaatagaattagtaactctgtagtttacagtacaaggtctaccaaacacaagtgtttcacctgattctatgacaacttgcatatcaccaaaatgtagtgtttgcaacatataccctgttttttcatctaaactgtctctcatggtgattagtataattctagcaattgcatctaaacacctagcagtatctatattagaacttattccaattatactaacattatcgttagattggtatcctttgtatacacctgcaacatcatcatctgatactttgcttatatacgacacattaatggatataccttctaactcctcattatatgaaaaatcaaatacaggtttgttatcttcaatcctaaaatggtcgctttctgcaaaacttatatctgagctgtttagatagtccgctactggttttgatgtatttataattagcttgtcaccttctctaataatagtggcttcctcactaattacattaccttctcgatactcgtagcctccttggattcctccaatagacttgctatcttcttcgctactaccgagagttactacaaatcgagcaaatgaatccagatgttcttgtgggaatgaataggacatctctacttctctcttaggtggcttaccatctatagagcaataagtgttttttaaaagattctaaagcttctttgtccatcccctttaaagcttcgtctataatatagcactctgatagaattatccttagcctttcttcaaattctttatacaagtaagtgtctaaacttggtatcatacactatcctcctaaattctttagtttccatttcatgagcctgtctatgtttcttagcattgtcttactcatatcatcatcattaacgtttctacgatttattatccaactattcgcaggagaattagcgttaactgtacggaaagctacataggtgttacgtgtacctttaccccaactctgtggtataacagttacattagtagatttaggtttgtagttaatactagacactgatgggctctgctttcgtctatcatacagatagtccattttaacagttacaggttttgtgcctactggaactgctctcaactcatcgtataatcgtcttgacatgtttcgtgttttcatactaatagggatgtataggtaccattccccctttttattatatttctttttattagaacgtgcaaagaaaggtttcaaatctataaccccatttttttgccatcctagactctgttactatcaaatagctaggcattctctgtacagaagacccattacgtagagcaacatcttgcgcatcacttagtacttcgtcaaccactgcacgagttagattgccaagtattgcttttgaatcagtaaacaatacgggtctctgtccttttctagccatttaatttacctccaaagaagcctcctgattttgtagctttacgcttagggtctaccatagcttcacttgtatcttttttgccctctagctcttccatacggcttgctgtatctatgtctaatgaaaatggttcactatcaataaacacgtcctcacgcttcaataagagctttttaggtaatgattcaaattgtgtttgtttaacaccaaatgtggtatactggtatctactttcttttaacaggtctataacaatatatctaagtgtaacagacatatttatggatatattagtatctattaaagattcatttgggtaaatagtatttgtgtcatagtccattctaaaatcgactccatcaactaagatacgtccgtctttaccataaatatcttctatgctgttcacatcatagcttaaaaatagtccattagctactcttcttttatttacattaaaaataaagctttgatatattttaacttcggggactgttattctatccctaaaggttatcttagaatctagctcagtcgttccaatagcggttcctgtatctagtagtcctaaatcttgattagaaatacctttctcttgactctgtatagccattcttaattttactgcaggttggtaagcaatccctcttcccctacagatggggcaatccgacttaggtgagagggtcattgggttacgacatgtacatagccatgctctttcccacaaaacgtcaatacctctattttcaatgaagctagccataccttttgtttcaaattcaaccctactagtatttaattgcttgttagggttacctgtttcacctgctccaccaaatctaattggtttttcacccatttgttaaccccccttttttaaataatacctaagttcattccaaagtaagataccaatgatttttctaattcttgtatgtcttcgtcaatttgtcgaatatctgcagaagcaccaccatacatagcagactgtgttgtttgtatactttcactaataccgtctactgttagtgacttactagcaatacctgcaccaattataagtctaccccattgttggaatatctcttttaacgcatactttattacaagctgttctaagtccgcagggcactcccagtcttcattgtatcctctattttttcctaggtagcattcctgccacatagtcaatatgaatcatttgaggagcatcaacttgcccccctgatggaggcattccctgctaattgtgggtaccctgagaacgtcatttcataaccaaactgtgttccagtctgcatgagggatgttgggtacatttgtatatgacctgctagtgcatacactttccaccaattagacgggtatctgtatagccctctaccattaacttctaattgaagcttttctgcttgaataataggtcttttaaacacatgagtatacatgtaagagttgaaatctgattggtggtaatcatgatgttctcctcttataagtctaggcataatagcaatatctagtcgtttctctgctttagctattgctgagtctatgatatgttcatagaaagtatctcctaaaggttctcctgtttcagggttaacaacctctacaccaaacatgtattgtttcagcgtagcaggtgtccaaccataatcggcaggctgtatatcatcaattttgtctaaatctatatgcttagggttcccatgtgcatatggttggtattggtatgtattgtccccttgttcctcgtatccgtagtctgggtacatataaatacctccttagtcttcctctttttagattttgtagtttttcttagcaggcgctttcttagcctttttaggtgcctcgtctgcttttttctgcagtagcttctttttctttagctttaggtgcatctggtatatattgtatatatggaactttagtccctaaatgttcttgctgttctactgttaggtctgtggtttccccattatggtcaaatgttacctcaccaaaagctgttgttactgttttatttattaagatttctgattttaacatattatttcctccatacatgtattttataataaaaatagggaacagtattaaccgtcccctattccatttttattcaattttgcttagtcttctaaagattagcgttcgttaaatacgttacctgttgcaatatatttaacgttcttaatgcgagcccatttcttaggtgcacgtaatgctaaagctccataccataatactgcgaatgttacagaagcattaacttgtgctaatggtaagcgcatcattggtagtaactcgaacaagtgaactactgatggagttaattccccaacgaatacgtccgctgtttcaggaatttcatcgttcacatcgataaatgtgataactccgtcaactgctttacttgcaggtactctagcgatttggtagaacaatcctgtttccaaacctttacggtaaattgcaacatattgtggacgagcttgatacatgttattaatagtgatttctaatttaacttgttttttcttgtcgtcaattactacagatgcaacatcagatggtgcagattctgcatcgtcagatactactacaactttgtattctgtgtcgattgttaaatcttcatcacggaatttaccttttgttcctgcttctaaagtagctttaacagttgctttttgaggagcattaggtagttgcatactattttcatctaaaatttgttctaattccattacagttgaaccatgtaaacgaatgaaaccacgtgcagagttaaaacctttaacgttgaatcccattgtagcgttttgaccgttgtcgctaattacttgaacttggcggtctaattgttggttaacgaagtctgcttgaacaccgataggcatataagcatctgttggtgtaccataacctttaccaactaataccgatgcttggttaagtaaagcttctgttaagctagcacctttagcatctagtacattatgtttgtcaattagtttagctaaaccatcgaactctaaacctgaacctgcatctgggttttctgataagtcagagtcaccgtagaaagaagcccattcaattgttttagcaacaactgagatagcatcgtctgtcaagatacgcattgggtcttcaatgttgttaactaaacctgttgcgatactcatatttttagtatcagaaacatatttcatgttaactgttttttgacgtaagttagggtctgaaattggtgctacaccgatttcacgagtaaaacgagtatgacctacacgtccatgcgctagatatacgtcatatttagctacagttgaagttgccggacgtttagtgatgtcacgataaaatgataagtctccgtctgcccaagttagcattgtgatttggtcgtctaagaactctcgtcttaaagcggcggcatcagtttgagattctggtgtaataccatatcctgtagtgaagcctttaattacttcttcctgtacggaagttaattgtcgttctgtattctttttctctgtcattatgtataaatcacctttctttatattcctctcaatataagacctgaccctgtggaggttcaggagggaatgtcaggtcttttattgtttctgctattaatatagcagtacaattaaaaatcgttcactatatagtaaaattatttatatttattgataaacccttcaattttagctaggtcttcatttgttctagcagttccccaagtgtgtctaactgattctaattcaccacgttgagctactccgctaacagacacacgtttatatgtttccataaagtctggtctaatagcctgtactctatcacggaacggtacttctttttcaggttctgctgtgtcttgttcaccatcaacaactacatctacagttggttcttcggtagctacctcttcctcaactgctacagacttattaacaaatccaacagccttgccttctgagtcctcttttcctgttttaatttcagggttgtcaagtagagatttctcaacagattcagcttcgtctttttctttagcttctttagcttctttaaactctctatgaatttcgtctaacttttcacttagacctaacatattttttaaagatagcttccatagcccctaagatttcagaagatttgataacttgttcgacttcggtagacttctcgatgtcttctttatcttctttgtcttttttatctttgtctttcttgtcttttttctttctttttgtcttcgtcttcttcgtcttcctcctcttcttcttcatctttattttctttagttttatcagatttttcaacagtttctgctgattcttcgacaggctcttcaaccgctacttcttcaacagtttctggctcttcctgttctgcttcaactgtttcagtaactccggattcttctccgtcattgcctgcagtttcctcagattcattaggcttttcttccggctcaacctcagcaccttcttcaactttttctggttcagtaggttcttctacagactttgtaatttcctcatctgtagtaggttttactttttcatttaactgtgcatcaaaatcttctataatatcgttcaatgttttagccactatttcttaccccctttcttctttcaataaagtttgttgcttctttcaaggaaatccctctacttaattgtaacataaatttagataattcattttcggaagtgtctacttctatatccttagctacttcacgtaaaataaattctttctctgcagggttttttactatatagccctgcaatagttcttactgcatacgtcaaattagaaatgtcctctttaaacatctctcttctaagtgcgcctgcatctacttgtgcatctggtgctgtaccatatcctgtagtccaagatttaactagtgtctcccatgtagctcttgggttagccggatgtgtcgttaatgcaacattatgtattttaacaccttctatgattctgttatcttgtgcatttctactaactactgcaccctcaatagaaaaacctaactgacgagatattcctgatttctggattgtattagctagcttccacatagactgtgcgtacttgttatcctttaatagcttagcctctacgaataaccctttgtccacatcaacataacaattgctagttggggcacctataataaactcagcatcatttttatgctcatagtttatccaaccattttcaataaaataagaaatatcaatgccctgtggtaaaataatatctccttgtaaatctaaatctggggtagttgcatatccttgcacataccattcaccatcattcacagattcagacttctgtatagaattttcaatatccagtggtacgaaaatactatattttttctctaacttctgacaatttgcttttcaccacctaaacgttttactgtatttaatatagcagaacatgtactatctagtaacacaaacaaagttgagggggagctaaccccctccattatcttttattatttttttataccatcagtaccatgcttagttgagttggtgttttcttccgattttaactgaccgtccttgccaacattgtcatctaccttgccattaactttcttagacttaccatttaaaccttgttgttcatcctgaaatgaaacatctgtatcattttgactgtctttaggttcttctggttctggttgttctacatctccaccagatagctctaatagtctatttaagcggtcttggcttctttggtattctagctgttcttcttgtaacgcttgcccaatagcttgtatgtgaacaccatttagtataacgtctccgcctttaattggttctaaacctttatcatgtcttatctcgttaactgttctgaatactttaccttcttgctcaattattttaagcttatctagttgagcacttaggtctcctcccctaaattggaattggtatttttctccaaattccgcaacaatatatgtgttaacggtgtcctctataaatcttaaaaggggttgtagccctttattctgagaagcttgcattttctcttttgagtttccttcatttagggagcctcctttagaacctgttgcaccaccattattagggaagtttatctctgcagggtcaattccatataaagcagatataacattaattaagtagttaagccatttttcaaattgcatatcattggcagagggtgtcatattgacgaatttgacatcttctgctgaaactacaggtatttgccatgagccatttatccctgctagtgagcttctccactctctacggaaaatgtctagtgcttgttgagactgctgttgccctgtttttacatgtaagatacctctggtagttcctccatgtgagaagaatctatcgttaaatacctctgtattttcatgggcaataaactgcttcaacgcaatttctaactctgggtaaccatactgacctacttcgatgtctgctcttgggttacgtactgcgaatgctagttctctctcattaaatttagcaacaattctgttatcaacaacctgaacaaatctttcaccgtttttaattagtttcccttcaccatttgttgctaagaaaattgtagttgggtctacagtatcaaatttgataaagttaccatctttatcaaataccttttcaaagtttacttggtcatacatgtatgttgcccgaacaagttttttacaaaaagttgtaaaattatctctattagggtctctaaattgtgctgtgttttctaaaaaactttcaatacgcttaatattagcaatgtcatgtgaagtaggttctgcttcaatatcttttaaacgtatctcgtaaccaacacctgtctcagaatttcttgcgggcttacaatacatcgatacttggtttgaccgtgtattaataatagcatttaatattatgttattaccaaactttttaagtgtcttatgtaagtcctgagagttacgtatagacggtttagttttatacccggggtttactgacatctctccaataattggttgcatatatgcagtggtcttaccattcatacctttttcaatactttccatactgtacggctcgttattgaccacattggtgtctatttcccttaaatgcatcttataattttccatattcctagtttcttctatggacgatttttctatacccagtgctttatctaaccattttggcaactgttacacctaccttatacataaatttttatccttgtcttatcgtttaagcatcttccattaggtatttcgatttctttctcttccatatcattataaaagaagcttttttgaccatcgttaactgtttcatagtcataaattacagggttaccttttctatctaataaaagtatctctctgctatctaacaatcttaaaattctatagctttctccgtttattgttgtatgtatctggacgtgatttccaccatactcatagtatgagtggataattaaaatccagtcaccaacaaacccattctttttagcaacttttttaaccatctgccatgtctcatcttgaatataacccatgtttcccctccttaaatggttttaacataagtctattataccacataactaatcataaccattttatattactatttactatatattaatatagcataaaaaaagaccccttaataaagaggtctttattgctatttaattttagtaccaaccatttgctaaccagaaagattttgcgttctcccatgagccatagcgacctgctacatactcatcagctactcgttcttggttggcaggtgaatagtcaccatttaaataagaggcagatagttggtaacgaccaatatactgaccatttgttgcatcataagaaccactagattcacgttgtgcaatccactcttttgctgagctactgtcagcaggtacctctactacaggggcaggggcttctgctacaactacaggttgctctacaacttcttgttctacaactacaggttgttcaggtgttactggttcgttatattgtacttcaatatctggttcagtggtattcacttgttccactagcttgccattttcatctaaaggtaataacaatttgtcacctacgaaaataacattagggtcagctacaacacctttattaactttgtggatattagtgaaatctaagttgtacttagctccaatttctgatagtgtgtctcctgactctaccttccaatatgtcttaccattctctgttacttcttctgccttagcttcggttcctaaacctactactaaacctaaacttaataaacttaaacctaaaatactagttttcttcaaaataaaattctcctcaatgttttctttatttgtgttgcttacaagaactaatataacatgtaattgttacagccaaaataacaagcggttacatagccattacatattattacgaatattacaaagaaagaaaaaagaccaccctaagatggtcttaaatctagtattaagattttttagtaatacctattactggacatactgtctctaatctgttataccatggtgcatttttattccactctttttggctgtagaacgggatgtcttttccgttgttttttctgtaaatatcctcaattactttcatttcatctgggtgggatactctacgacaatttactccattacaaaacataactgtccatgcatcaccattccactctaacactcctgtttttgagttaataggtctttcgtataaacaatacatagttgccactccttctttatttttattgttacttggtttgcttggtgtaggtttacttggctctggtttaactgcgttgttagagcccccctaccataaattgttgagcttgacgtacaacttcgtctacatccatacctccgggacatgctgttgcagttacttcgttatgtcctaacacgtgttgtcggtcacatggaataccataacgtttacaaatatctgccactaaacgggcacaatttgtaattgttctagggtctacatcccagttaggtgctcctgacgaatttacattttcgataccgattgagcgttgattagggttagcaatcttagggacatctataccaccctgtgcctccggcatggaatgctgaatactgctcaccaacacaccctataatttctgttggtgtgacttcatagtgcgcagacgtacctgcaccaccacctaatagccacgtgttcatagcaacatctttatttgttgttgcattatgatgtagaataatacggtcaatagagataccattacggctacctgcgttcattgggttaggatttacacttgtaatcaagctactaaatacttctcctgccatctattaaacctccttagttagtcataaaaaagaaacgagttctatttcatgcatatctaatatagcacaaaatagaactcgttaatttaatttttatagatgttcaactaagaatctctctacaccgtcaatatcagttttatctgagtaagtagcaacacattctacaatagttgtcagttctccattgttaagcttaacttgttgcttacctttctctaaagaaataggcagacctaaatctttatccctatttatcatccccgcacacataaggaatgattctactgcattatccccttttttttattagatagtagggcacaggaatcataacttgacttgtatattctaagttatcgggcattgcatctctttttttctttaagcaatcttaaattttttataagagctttccccaaagaatttttaatttccattatgagctttcagcccctctctcatactgttaactagctccattaaatcatatttttctgcgacttcatctgttaattcattagccaaagcctcagttactcttaatgtgttaagcacgtcatcttttgtttttagtacttccatagctctttctcgttcttcttctaacttagcttgacgttctttacgctcttcttcttgcttagccatatattcttttgtaccaaatacaatatttacacgtacttcttgtgcctgtagtatagagctacaccctgtttgtaattcatcaatgatagcctcacctagtggtaaaactttaccatccttaacagcttcgacaaatctcttgtttatctctagttcatttaaatttttatctacagctaatctaaataaattctcatactcaactgggtattctgctctgattacttggaaccctaaaaaataacctgatgtgtagtctccttctggtgggttttgttgtaaaaactggtagttctcatacaaatctttaactagcttacccatcttctctacaaaaatatcgtagtcctcatcagtagctaccttattagttaattcatctagtttcttattattcataattaattccatattatttatttctcctttcaatatatgcattatatcatttgttatatctgttactttatctgttagtccctcttttgctagcatctttaagttataaaattctttaactaccttacttactagtaaattaaaaattaaaaaaataatagttgaaaatactagtataatgactaacgtagcacttatgactaaggctcccctagaagactacgcagtgagctcattgacacaatatactctgtattatttcttttgtatccatataagctaattagttcctctacatcaggtgcattatctgtgcttatcttagcccctagacccaatttccaagcctttaatgtgagctgtgaaaaagctaacatcttcataccttcaacagcctcatctgacattgagaaagacatttttaaataagaaccttctctagtaaaccctaccactcctcgtgtaacagagtcttgttcaagaataagataatcagtacactgcgtatcaaaattatttccaaattttttagtgtctgctagcaattttgctatctttttagggtctaacttctcttcttcatcactacctaagctaaccttacgtagttccttagcattaactggttctaactcttttttctttttactctctttgtctaaagggttactgttattattgtccgaactgcctgtatcttcataaatagttgtagtcatagttttaccatttctaacaacttttcttttaacaggttttagcttagacaagtctttttgaccaccttttactaaatacatatctttagaatcacagctatctgcatatagatacatgtcataaaaattgtcaaacccatacgcttttacaatatgttgatattcgtttgtcagcaattcgttattttttataacgtactcataacttaaagacttatttattagtccttcaattgtacttttacttatttttacattgttgtctaccataactatccccctaactatatttattataccacaaaaatatatatcaaacaatacaaaatgccttattcagcttgactaaaactaaataaggcaatctacctatacaaattctgtaaatatatcaggtttcgtaggtgctaactgagtggacacccaatcagagtcaaatccatactcttttactcctgtaaatacattcattaggtactcataccctaacatggaataaacgcttgcttgtgagtagtggtcatcaccttttctgccgataatttgtctaaaacctgtcgatgtctttttcgtcctcaatatcacgtataacaacattcttccagtgctctttatataaattaagctctgtatctggttttgagtagtaacctatttctccttctttcatcttgttaatgtaacgtttattctgcattagcttgtcagcggatactttatttgcttgtgggctccaagtaggtactaggttaccagtagatttaggggttgatgggtagacacacccaaaaactcgttcttttccataaatttgcataagtttagcaactttatcccctgagtcccctacgtcagctacgattatatctggattgtaaggagctagttgtaattttatagactgtatgtctacatctattgcattagggtctagcgggttggacttacccacagaaaaaagttttatcaaatctaccgtaccatttgttttaacaccatgtatagatacccaatgtctgttaccccagtcaataccaacagatataaatttatagtcacctctgtctttagcaggttctactaaatagtttctcttatggctatcaacgtcagagtcgttaacagttaatttcaagtctgcgtaaggatacgagctaccgctactttcgtagtattttgttactgctcttggcagtcggactagactatatcatcaacctactttttggtttaggttgctctgctttacactacaaatttgatttccttttctaagtatgccgataccttttctattgtatcgagtgagtaaggtacttccactaatagcaacccatgctcacttgcgtattttcgttttcttttatcgctttcctgttgaagtttaaaccgttcagctccaccgaagtgagctattggttcatagtgttgtataccttgatattcaatcagcaactgctgactaggtatataaaagtcataggataatggttttttaagttctaaattaggaaaggtttgctgttctgtaaattccaaacctatatttgttagatacttccgaatcaatgcttcacctctcgatgacttacacctaggacacatattatggtgtagcaaatgacttgctttgatttcccactcattaccacagcggttgtgacgtaccaaaactttttttcttgctacccatgtactcagataataatgtgtattctttcggaaagcgttcctctaattttttgataaactgctctgtagagtacctctgctcctgtgctgtcgtattccttacgcacgtagggcatcgtgttcctcgggataaaaaactattcggagaaactctccatgagttaccacatattctatgttggattgctactttgttagtagctcctgtatactctcctacaacgatgtattcattatccgttaagtttgtaacctcttctgcgaactgctcttgtgtcttttgcttagctcctcgtagcttatttctacaatgagggcatcggttaccatccaaaaaaccttttggtttaactaggtaagtggtgttacacgttgtgtgagttatagctatctttgttttgttatttacatattcaccaacaactgtatattcattgttagtaagttcagctacccgagctgtaaatgtttcagtggtttgtttctttgccatctaatcacctctcagtaattataatagcatacttagaatgttttgtagttcttatctagttctcactaaccccatttggttagctacctagaaatttagtcgttaggcatttacaagcttacgcttgatttagcacgggattccctctttccttttcaggaggcagggtctcttatcaggatattggttattttcctatgcccgtttaacagagttttcgacaactgtttccagttgaaggggcgttattcacccagagtatagttataaaaggcttgtttagataatgattgaagttctttggtctttaactggtcggcagttacccatactgcgttcatttgggaaatcatatatcctctagtacctagaccattttttgttctatcagggtatttaggtacccatacaccgttgtaccatctgtctaacggttctccacacttttgacaaacaaactggaatgagccgtcaactactgttttagcaacaacatcgaccccttttgggttaacacaaagaatgttacccctactctctacaggagcctctggtgtatatgcatcataactcatttcgttataataattacatttctcacatttatgtaaataccaatgttggtctgaccctttaaagagcccatgtattcccatatctggggcacttggagtgctccatctgttaactatcttataaggtgaagaagacatggactccaacgcagaagcctctgctaatgcaggtacacggtcatattcgtccatagatagatagtcaatatcgacaccctctacagcgcccggttttgagcttgaacgaaaatacaaaaaactatttcttatttttttagcttttaatgagttaacttcttggtctacaattgtgctgtagtatccattctgtaaaacagggtctaaccttgtctgtacaaatttagtcatttgctcattcgttggaaatgtataaagacatttaacagcatcataactatgtgtgtctgcaaactgtagcatagaaccaacgcccatctccgatagtcctagctgtcttgatttaattattgccttgtctctatgttggtcatttattatctttggttgccaaggtcgatgtgcctgtgcttttgttgcatcccttcctgatataataaaagttattgggtgattacgcacagagtgatttctcaataggtacgttgatggggtcagcatatctgttatataagctaactgctccgttgtaattttatctgtaccatacatctctttagccattttagctatatgttgtgcttttgtcgtcattagaaggtcgcctcgttctctctgttcatctgtagctctctgttaactaagacttcctcaagttggtcatctggaagactggctaactcatcaagagaaattagctcctcttcttcaccgtccttaataatcttttctgtgctaaccttttcagatatgatgtctttatgctcagatgtaagtgcaggtagagttcctgtaccttcttgcattccatcatttatattattaacctgtaaataaatctgaaatagccttgttaaatctgcaatatcatcaacttctatagcacctgatgtaacgttagccataaattgattgataagcttttattgaagcttgattaaatgtgtctcttagttgttgctctggtgttctttctaacttttttttgttttgcattatctttaagtctatctgccatacccattagctagctttcccctttcttactagaatacgcataacaagaccttatatcctcacagacatttagtctaacaatgtctgaaatcttacagctaatatggtctactactactgttggtacgcctgttcttaatacgagcttagatagcggtcttccacaaactgcacatattcttgttgcactacttatgcgtttgtcccctctttttatagttgttgttttactagattgactaaaaatatatctacgtttatccttaatgtctttattggtaatagacacccatcccacctcctaataggctatctttttatgatagctttaatcttctgcaagtcactgattgcttctttaagttgattctctacgttctctttttttctttttattagtataccagtcaaacagaatactagataacagtgcacatgaggcaccgccaactaatgcctgaaatggggcattttgttctacaataacatatttagagaacagcttacttaaagtaaccatgactaatgcagagatggtaataaaaataatttttttaataattcgtttgctattatccatttttaccactctcccgtctacatttttagtctctatattaatttagcacacctgtttgctaacagctcagtgtactatattaatagtagctctaagggagaggagggaacaacataatgtatgaaacagcactggtctgtgtactgttactacaaatgtttgtttacttgatgtcctactatgtcactcgtgcactacagtataagaaactacaagcagaactgagccctttggcatcatacaagttcactttcgtgctctatggaattagtataggtagtctatacttgttttttaatgggtactatatacctatagtctacacggtaggcgctattataggtatattagtctgtctgtggtttacatctgactaatatagagcaacataacttacagggaggagcatatatgaacgattaccaagtaaatgaccttgttttaagactacaacgactggaagataaactccaacatggagagctaaccgagaagggcattaaacaggacaatgtagaactgaatagtgcggttagtgagttgagagatattgtcaatagtcttgataagcgacttgctgttcacgaagaaaaatatgcacacctaacctaccagattactaagttggaagaaactatagatgcactggaaggagtaaacgataaagagttcgaccacaagagggatattgtagagaacgtttttatgattgtcttaggagcagttgtcacttacgtgttcagcatgtttaagtaatttgtaaaatgtgttattatagtatatagtattattataacatattttgaaaggagaagtatcatgaattaccctaaaagagagaaagttgtagaggtttcattaacatctgggacatattctgtgttccctagaagacttggtgtaacaactaatgatgcaatgtcaattgtaaatggtgcaatgaaaggtgcagagttgccaatgattccagttcataaactagctgatagagattctgagttaacttatgtaaatgcattccagatacagacagctactgagaacgtagtagatgttccagaaagaatcactagcttgtatacgaaaccagaggatgaaacaccagaagatgaggaagtcagattgggaacaattaataactatttctcattaagataagagggcttaactgctctttttttttgtttaagtaaaatgtcctattttaaatttttgtctttcttatattatatactatatatatatataataatatataatacttaatactatatattataaataataatataaggagatagaaaaaatgaaataggacatttttgtaaaaaaggtagccaccataagtttattgtaactgagtcagcattagaatgtcctattttaaatttcctagattcttattatctatatataatatctaatagtaattaatatatatatatagtactatatagtatatattataaatataaggaatcagaaaaaaagaaataggacattacacaattataaaaaaatgtaaaaaagttattgacacaatcagaataacatgatattatatattcatacgttggataaccggaatgtatcaaaggtatttctaaaattttaaaaaatatagatatactatatcaccaaaaaaaattaatatctcgttatgtggtataatatatctataggagcactcagggtagtttggtaccttcggcaataggttcgattcctactgagtgcatagcatggactttgcaaacaatgcttataagctaaactggtgttgcttacattaagtaggttcaattcctacattagcttttacatagctcagctatgtttaatatctcttgcccctatataaaattaggggcaccctctctaaaaaaaaaagtagttgacaaaataatagaggttgtgctattattaaatagtaaagaaaaactgcttttgataattgaaaacttaatataatagaacctagtgcagaaagtttgaacagcttgctaggataacgtggcgtgattctgaatgtagcctagagtgcgatagtgttttaggtagcaggtatgtcttatggtgacataagagtaactactagtaaaagctagtatcagttaagcgttatgtggagtgtacatggattgtaaggtacaagactcttgggggatataatagacgttcctgtggaaaagaatctaagttaggtggaagcgtgagaaacttggcagaccttagaaacctcaaaagactccctttgacgagaaccatagaaatatgggtttaacaagagaccttggtacaagtagcctaagtcagcttacaaaatatatgatataagaagaacttataacaatactatttaatgctgaatgtttaggtgaacgttgttagccaccgtgctagaccatacattaaaagcagagagaagctattgggtagctcccgatagttcagcctctctgggtgtgtgaccgaatgcagtgagtgtgcatgaagcaggagtaaaagccctattatattaagttttgagttattaaaagctcataaaaaatatatttatgccgtagtaacatcagcgcttcaactgttgttgtatattataaaaaaactttcctttctaaaaaaactacggcataaataatggcagtatagggcagaggctgtcccaacacgttgtcagcgtggaacacacgggttcgagtcccgttactgtcgtcattttagctagctaccatattgtcaaacaaatactacatgaactaccatataagaggacttatcactggaagttagctattaacaggtaaccattaaacaagatgtaaaacagtgcaaatctgtagttacctattccactgtaagtggacacatggcatctccttacatcccaccttgattccatgattgtatttttttttgtttgttttttttaattactgtaaagaaggtcttcgctttccttctttacatagtcggttagtgtaactggtaacacgttggtctccaaaaccaataataggggttcaaatcctctaccgattgttagccttaattggaaaactatattttactagtagtttacgtagtatgactaatcagctaaccgttaactagtaaacctttaactaatgagaattgagcctgacttctccggaggcaggatggagcatacccaagggtttggggcttaccacagtcccaccccgatgcttcggggtagcttattgcagtaagctactaagttccaaacattgttaacaactactaaggctgtataatacgattcggtcaatgtagttctctttctatacctcactaacttagctccaactaagtagccagtgccatcaacgttctctccttacgtatagtcattggcattagtgaggtatagaaatttattttaataaaagtgttgacatgctatgtaaatagtgttatactttattcaagttagatattcattttaatcctcgatagatgaaactactatgagttattatggggggctcattacccccataatttgtaggtgtagctcaatcggatagagcatccgccttctaagcggacggttggggggttcgattccctccatctacgttaacccgtataggctactttagggagtagcactcgggttatgtgcacatacttgttatacctccctaagtttaacaagtactcctgtaaaagaatttaacgattgacaaacagacatactataggttgtaatactgctagtgcttgtaccacacagacagactacttttagtaatactgatattgctcgttaattcaatggttctgttactgtaacagtgatgggtaatttattattagaaagacgttgccgagcatactgtcggtggatagtgaggtaaaagtccttgaaacttttgagtacggctgtcataagtcatgtgacattaaataacaatgtaagtgagtagtctagggaatgtttgacgtacatggagttaaccagttctcaccaaaaaatagactaacacttccctgaatggggttgagtccacatgaattattagtatgaggactgcgtaaaacagtagtgtactggttagcatagttatggttaatgcaccgcttgtttcccatagcgcttgtcggaggcttgtaggtaagaggggttcaaatcctctcaccagtattactgttaaggtacggtctagggaaaacgttaaatcagaaacccttaatagtaaaaggtgctactgaggttaggttccttgcaatccatgtaaggtatggctccctaccagacacgagtttagccttttagaggtaaccttggtagtacaaccgcagaagtgatggaactggtagacaacggtgtcttagaaacatcggtctgtaatggacgtgtgggttcgactcccgccttctgcataggtaaacttcctaataacctaatataatatggctactacccatcgtaacttacatacggttcgatgatagtctccccttggcagagggtttatctttacctgtgtgtagtagtttaaaagaccaaattaaacaggtaacacggaaagtagctcagcttggtagagtgcaggctttgggagtctgatgtcgcaggttcaagtcctgtctttccgatttgataagtttataatcatcaggagagtagcatttgtaattgttgctactaccctacggacgtttagctcagttggtcagagcattcggctcataaccgaacggtcgcaggttcgagacctgcaatgtccattggttgcctgcgcctcttaacatgcgaaccaaggtaatcggtttagttatgtgtagtttaactgtatataaatatgattagtagtaggagctatcataggaaattatagttagaacctagctaaatctagtatagtcaagtcctaccttgataactatattaggtgatgcgaaatacacaattaatcatccagtaacagagagacacaggtgctgtccgtgtgtcaggtacctatctggttggttattcaaggagagttattccgtaagtagtagcggagcagactgtaaatctgttgcttaggctcgggtggtgcgactccatcactctccatttataatttattaaaaagtattaaggagagaatatatgaaagtaatcaattatggtagtaattatgagatttatgcaaacgacctgaaaacttatgataagttgcctgcgcaaacttataaagttagattcaacccaatgtctgggttctcattggcggttacagacgattttaaattgaaagaatctaaagtttatggtgaccgtttagttaaaattgagaaagtactacacacatttaaaacaatcaatcgtagtttaggggttattttaagtggggataaagggattggtaaatcactatttactcaaatcttatctcaacgagctattgaagagggtatgcctgttatcttaattacagaagcttatcctggtatcgcagaatttattgacagtattgaccaagagtctcttatcttgttcgatgaatttgaaaaagtattcaatgaccgtgacggtcgtgaatcacaagaaaaactattgagcttattcgatgggttatcacaacgcaagcgtatttatgcacttactgttaataacttaaatcgtgtaaacgactttatgcttaatcgtccgggacgtttccattaccatttacgtttcgactaccctgatgcagacgaaattcgtacttacttgcaagataagttagacaaagcttactatggggaaattgacagtgttgttaagtttagccgtagaattaagttaaactatgattgcttacgagcaattgcgttggaattaagctttggcatctcatttggtgaagctattgctgatttgaacattcttaatattgaaaatcagtattatacagttactattcaatttgaaggtgggctacaacctgttgtaattaactctcgaagtttaaatttatttgaagatagagtatcattcagtagtcgtacaaaagaagacgacatctattttgatgtatcatttaacagtaaagacttacaagtaggtaaagatgaaacaatcgatattttaggtaagaacgttaatgttgatgtgtaccttgatgacgaagacgatgaaaagtacaatgacttagctatcaagagtatcatgtttaaacaagctaaaacaaatacctacggatatggtaatttagtataagaaactccctctattgaggggttacgctgatttagtataatggctattactccggttttgtaacccgggaatgggagttcgactctctcaatcagcattgtgagtggaaactcacaaattaatacttaaacagaggagatagatagacatgatactacaaattttaggagaacgaaaatacgattgtaaagacagtacagaggaacctattgttaagccttttattgaattaattgatggggtacagtttcttttagagcaagagaatgctttttcattacttaactctaaacatgaagaaatcactcgtgtgccaaattcaccttacgagtacagaactgaaaaagaagggtataaaacttttgtaaattctgtgtacgttttaaatgatgaaggtaagacgttacggagactttttgagagaggtctataaacgtatagttgtaagtatctattaaggaaggcttacaatgagtaggagtctcataaaaccctattaccactattataatttattaaaaaaaaacagtaaggagctattaatatgaaaaaattttatggaatcatttctacgacaacaactcgtacagaggagtatgagaagaaattaaaaaatggtaaaactgaaattcgtacacgtgaagtaacggtacctaaagaaattactgttcaatcttcgcaacctgaccgtttaggtgctcgtaaagagttagaggcttttgcacgtaaatgtaatggtaaagtaacttatatcggggctttcgcatagttcctgatgctgagcctgtctacctgataggctcttatttttttaagaataaggagggatagtcatggaagaaaaggtaccaaaacctaaagtccttaaaagagtgagagaggctaggggtgaatctctacgagagttagccaatatgataggagttcactggtcatcaatctcttattgggaaaacggtataaaagaacctcgtgttaaaaacagagtaaaacttgctaaattatataatatacctgtagagattctttttgaagaagacaacggacaagaattgcctttataatgggcaattctttttgtataaaaagtgttgactttacatatctgacatgctataatcttattatagaaataagagagggagagatatgtatgaaaacaacagatttacaaaaaaaaggagctactagagaaggacttacgctcttacaagaaattatatgaattgcaaaaaagtattaaagaagagattgatgagctaaaaagtagtatcatttctgatatggaagagttaggggaatctaaaattagtattgatgggggcacatttaaattaatgccagagtacaaacgtgctagcgcagatactaagttattgatgaacgtataccctaacgtttggggaaaaagttaaaaatgtgtatacagttaacaaatacattaaatttacgaaggactgatttgtttggctactagaaataaaattggaacatacacgaacgatgaaggtaacgttgtagttcaaatggcaggtagtaaggcagaactacttgaattactatcatttttaaatgcaaaatacttattagaagttacagacacaccagaagaatatcagaaagtgtttaataggttgcaggttgaaactggtaaaaactattctgttttactacttgataaggttacgaataaatcgcaggaatcagaagatttcttaggtgacaaggtgtaacttattaaaaggggctacaattaacttttgtagtctctagtttttttggttctttatttttgacaattaatgcaaaatagtgtttaattaataaatacgataaaaaagttaggagaatgtagtaaatgacaaaagtaacagtatattcaaaagatatgtgtggtcaatgtttattttttaaaaaatatgttaaatggaaagaatatcccatttgatgagaaaaatatctctcatgatgagcaagctttagcttatctaaaagaaaaaggagtgtcttcattaccatatgtagaagctgatgatggtttctcatttaatggtgttagacctgatttggttaaaaaactagaaaaagaacttggggtgtagatatgaacacatatattgagcttaataaccaattgaatatccctaataacggaaagattcagttagacaaagataaagaagctgttagagcattcttttttagaacatgtaaacaagaacacagtatttttctactctttagaggagaaaattagttaccttattagagaagggtacatcgataaaacagtgattactgacaagtactcaatggaatttataaaaaaattatttaagttcatctatagtaaaaagttcagattcgacacatttatggggggcttaccgtttctacaaacaatacgcaatgaaaacagatgatggggaacgatacctagagcgttatgaagatagagtagcgtttaatgcactcacaatgggtgatggtgacgaagagcttgctatgaagattgcagatgagctaattaaccgtagataccaacctgcaacccctacttttttaaatgcaggtaggcttagaagaggggagtatgtcagctgttttctaattcaagtagaagattcaatgtcttcaattggtagaacgttgaacagtgcacttcaactatctaaacttggtggtggagttggtattaacctaagtaatttaagagctcttggagaccctattaagggaattgagggagcaggtagcggggttgtccctgttatgaaaatgctagaagatggtttccggtacgcaaatcagttaggacaaagacaaggtgcaggcgcagtctatctaaatgttttccatgcggatattatggactttttatcaactagaaaagaaaatgcagaatccgcaaagcaaatcaaaacactttctttgggagtagttgttcccgataaattttatgagctagctgagtctggggatgtaattcacttattttctccatatgatgttgctaaagaatacggtgtaccattctcatttgtagacattgattcagaatacaataacatgattcagaacccaaatatcagaagtaaggtaatgaatgcacgagatttggaagaagaaattagccgtttacaacaagagtcaggttatccatatattatgaatgttagtactgtaaataaagccaatcctattgatggcgaaatcattatgagtaatttatgcagtgaaatattacaggtacagacgccatctaagctaaatgatgaacaagtatacgaagagttaggtacagacattagctgtaatttaggttcaattaacatccttaacttgttagaaacatctaatgatgtagtggcatcaattgagacgatggtaagagctctaacatatattacagatgtgtcaaatataaaagcagtacctactatcaagaatggtaatgataaagcccatacaattggtttagggggcaatggggctacatgcgtggttcgcaagtaaccaagtagagtatggttcacctgaatctattgaaatgacggatgctctgtttgaattaattaactatgctactttggtggcaagtaataagattgctaaagagcgtggcacaacattctataactttgagaactctaaatacgcagacggttcttactttgatgaatatgtaccaacactaaatcaggaaatctctagtaaggtggcggaagtattcgatggagtggtactacctaatgtaaaagattgggaaacattaagaaacagcattattgaagatggtctataccatcaaaaccgtttagctgtggcgcctaaataatattgggctttctcatatgtgaatatgagtcaaaaacaacttaaattgctggaacctcctaaagctaactaaactacaacgtgactggaaacggtgagcgtgaatgttgcgaaagcagaaaaaattagttagatagcctatgctgaaataaaagccttgttacaggtgctaagggcaatacaatgggaaatcagcatcgaaacctctgtaaaatgagggacgtccaacgactataatagttggtactatttttgggatagtataaggtatagtctagtccgactgctaagagcagtgttaaagtattacgaaagtaacggtataaacgaatggcagtattgcttatgttaatgagactacttcttcattgcacccaattatctctatgattgaagaacgtcaagatgggaaaacaggtaaaacttattaccctgcaccccggttatctgagaagacaattccatattacaagtcagcgtacaacacaagtatgattgacgtaatcaacgtgtacgcaacggcacaaaaacatattgaccaaggtatgagtttaacattgtttatgcgctcagagttaccagaaaatctttatccttggaaggtggagggtggcgctacatccactcgggacttaactttattaagacattatgcatggaaaaaaggtataaaaacaatttattatgttagaacattcaccgaagaagacggaagcgaagtaggggtttcagagtgtgaaagttgtacaatttaaggagatgaacacatgaatttgcaagaaaagtatgaaggaattaactggaataagattgatgatgtaattgaccaagccacatggaaaaagcttactgagcaattttggttggacacacgtgtccctgtaggtaacgatgttaatgattgggcaaagctctctgatatggagcaagatttaataaataaagtgtttggtgggttaacattactagacacagttcaatcagaatcgggggtgcactcactactcgatgacgtaagaacacaacatgaagaagctgttttaaataacatcgcctttatggaagcagtacacgctaaaagttattcaacaatttttagcacattcaatacacctacagagattgacaatatttttgaatgggtagctacgaataaacgtttacaatataaagctaatattattaacgatatttaccgaaatgggacaccattacagaaaaagagtgcatccgtactgttggagagcttcctattttactcaggtttttacacaccactacgctatttgggtgaggcaaaaatggttaatacagccgaaattattaaattaattattcgtgacgagtctgtacatggaacctatatcggctataaataccagttagggtttaaccagttaccagaaactgaacaaaaagaaatggaacaatgggtaatcgatttagcatttaaattatgggaaaacgaaacacagtatactgctgaattatatagtgagattggttggacaaaagatgttaatacatttttggagtacaatttaaataaagctctagctaacttagggatgaaccctttattcccaacaacaagcgcagacgtaaaccctattgtaatgaatggtatctctacaacaactagtaaccatgacttcttctctcaggtaggtaatgggtacttattaggtaaagtagaaccagtaaccgatgcggactataacgctttagacaagctagccagtttagtatagaatttagtagatatgagacataccaatatgtctcatatttttttttataatattttgttgacttttaaatttagatatgatatatttctattatagggaaaagaaatgtaggagggcacaacatggattttgataaaatttataaagatttagtaatggatattattaagaatggagtaacagaattaccagaagggactcgtgcagtatatgctgatgggactcctgcaacaactaagtttattgaaggtgtaaactttacaatcacaccagatatgggagctcctttattacgtagtaagcatgtaggtattaaatgggcgctaacagaattgcagtggatttggcaagaaatgtctaacgaggtttcgtggttaaaagaacgaggtgtaactatttggaacgaatgggagcaagaagatggcactattggaaaagcgtatggttacgcattatttaacaaagaacgttttattcctgtttatagtggagatgttgagttagctaaaaatcgcaaagcgggctcactcatcccaaaagtagtacctaaaaaaggcggttggatagcaggaacacatcaaccatacctaaagctaaatcaggtagaggcagttattgaacaacttaagagcacaccaaactctcgtagaattatgactactttatggaacgtggaagatttatatgatatgtcattagaaccatgtgtatggacaacccactggacagttgtagagggcaaattaaacttacatgtgaaggctcggtcttcggatgtttgcttaggacttccatttaatattattcagtatcatgcattacaattggttatggcaaatactgtagggttagagttaggtaacttatattggacgagtgataacgcacacatttacgaacgacatttagagctagtagagaaacaggtaaacgcaccaattccagaagaggttccaaagcttgtcctaccatggaagaaggggacgaacttctttgattccccattatcagatatttctgtagtaaattataaacacaatggaaaatttaactatgaggtggcaatttaatggcaaataaagcaagtttagagaacctattagcgatggcagtgactgcaaaagagcatgagatgtctcgtcatgctaacaaaatgagacaacttgagaagacagaagcaaatatcaagaaacgaattaaggagctaagcaaggagggctagtttatgggatttactaaaattgaaacaagagagtggtacaatagtgacctagacaaactacacaaagaaggtagagacatctatgtaaaactaaaaataggtaagagactgacccatggagagtatgaacgagaaccaaataatgggtttcaagtaattaataatgaagacaccttcccattaaccttagataactatgaggtttacacagagactactactgagctaactgagaaacagctaattgtattagtctggctaattcactatcttgaacgtacaaagctaactattgcagatagcttacacaatttaatatctggtaaggctaacgatgcgacacttcaagtttgggcagacctctctagtgtagaggaggcggaggttattagagaactggtagactacgtaatagataaaggaggtaacctatgagtaaggagttaatatcatgcggggcgtgtaatgaagtgttcagtgagatggacgaggttgtgcggttaacggacgattcgatgtatcataaggactgtgtaaccctctactcaactggatactgtgcattcttagatgatgagtacctaggtgacactgaaaatggagagggagaacccgcttgctttttcttagaagaaggggaatatatagaagaggaggaatagagatgttttataaaataattgaattaatggctgagcttaccaaagaaattaaagaaataaaagacacgttaggttgttcaatgcctatagcagaagaccgtaaagtgacaagaattgcatacttatctgaacagctagatgatttaaacagtttactattagatattccagtaaactaccatgagacatggttattagatgaaccattaacacagaatactccatatgagtttcatatagaagtaatggtgttaccttatggtaaaatgggagtagacgttaaatgttattatgaagaggtagcttcaagtatttcactaggggtagacgaatttcgtacactaccagatacggtagatgaactacaagagcgtactttccacaactttcatggactttcccgagaggaggctataaacaaatggagcttatgatagaaggtgttagccgtggggagttttccaaacagtttatcaaggtaagccagacaacggaagctactgtagatattgctgtaataaatcgtacagtagaggtatttagaccggactgtgtacatgagaaaacagtaactctgacaaaggaaaatttagatttactggtgacagcgataggctatactaaagaaaggatgagcaatcatgggtaaacagatattaaaaggttgggtaactattgataacagccccggtgcagaaacaaacgaaccttacttaataaaagaaaaagtaaaagaaattgagtatcaccatgagcacagagccttaaacatgcttatttgtaatgcactacatgcgttagggggctaaggacactacaacagaagaggagtacgatgggggtatttcttctaagtaccatcttgataacgcagagattcagattttctctgctgtagaacgtacttcattagaagacatcactaaaaatatagtacttaaatctatgggggtcttggactttgaagaaggttggtatggttggtcttcctttactatcgaagggtttgagacaaacacatttaagctaggcggtcatgacatactagatattgttaagcagttagagggcaagtatgtgtatatcactattgacaaagtataacaaaggagacaaactatgaataatgaggtagaagtaccaaaacaggtaaaagagtttattgataaacaacgagaacaacttatggataagttacaaattatcttggaagggcagagacacgcatgtgagtatcccaagtcagagtttagtaaatggtttttcgcaaatacagatacttttattcaagcagtagcaaacactgctagtttacctaagtactatgtagtaatgcctcagaaacaggagagagactacgggttactattacgcaatgatgggcagttagcagtatgcatattacctagaaacgagccattgagtcaagataccctatccaaattaaaaggctactatttaacagaggcagagataaaagaaattgatgaacggtattggttatttaagaaaacacgagaggagctttcgtatgaattacagaattgtatcttatgagaacagtcaggaatggctagatgctttcaatgaatttagcggaaatagctttaagatgaatgaagccatccacccagagatatatgagcctattaaaactgcagtattgctctttaaccacgaagtggcagaaggagaggctattcgtttagagaaaatagatgaatcagaagaagatacgtgtgaccatacttatgaaacgtatacagtacaaacaggctactcttcaacagatattgaacaagcaggcttttgtacaaagtgcgggcatgatacacataagggatataaagaatacacattaaaataggaggactattatgacaattattgaccatggaagtaaaccactaaacaattgctcgaaaaatgaactgttagacatcatccagtctcaactagagaatgaagtaaaacttgttaaactgattgaacgtactacaaaagaggtagaggaagagaaggaagtccctcattacaagaactatatctcccctgagaaacgtagctacttagagggcatggaacgtgtagaaaacattgtaagaaacttctatggttttaacaatgaataaaccagtaagagcaaccagtgagcaagtagtataccgagaagagtacgctaatggatggtcagtagaggtaattcattctctaaaaggattcggacatatctatgtagagaacaaaccctattcagtggctattatgaaacctgcagaaaactttgcggactatagcacagtaggcacagcagaagaagtactgaaaattattgaggaagtagtagaatatgaggaggacatgtgatgaatgaactagacggaattagtaaattagaagctgatattattaaaactactcagctactagaaacacaacaagaactaaaaagaactttatccgtaacgaaaaattgtctaaacggaactatgagttgtctattgatgtgttaaaattaagaaacactttattagatgttatggaggacttagataatttgatggaaaatgtagaaggcatcaaggaggatgcgaacaaacatagcaaagtagaaaaagaaatggttagaggttggcttgaacggactggtaagttagctaacgaaaccagaaagaatattgaagaggtactagaaagttatgagaattagaaaacatgcaaataaaataatcgggtggctatttattttttttagcggtattgacaattgttaaagttatagtaattggaaagccacttggcggatttgatattgtactatatgtactactacagctactatatggtatggaaaagttgtcaaacgatgaataggagtagatttttctacttctttttttttgcctgttgacagaatcataatagtagggtaatattatatcatagaaaaggggaggaaaaacaatgattagaaaacaactattatttgagttagaagtagaagttgacgaaccaatggttggacgtaacggatatagaactgtaatgcaaacaacaaggttatacgcatattcacttgatgatgcttaccacgcatttagagagaatcacagatatataatcaagtcaatcaaagaagtggaggaagaaataaatgacgaaattaagctcagcatggttagtgaaatttgagtatagagcggtaaaaatgagggctttcacctcatatgataaagcagtcacatattataatgaaatggtacagaatattgatgaacaaattgaagaaagctactacgagacaaaaacaacatacacagatgaccacaaaccacttctaacacaatttatatactggaatgaagaccgtactttccgcaatatacttggctttgtatcaataaaagaaattgaattggaggaaagcaaaaatgacactaaaaattagatgtacacgtaaaacagagcttatcttcacagaaggtaaagagtacgatgtattctatgatgatgctagaggttacttccttagagatgatgagggagacattatagaatcaggagccactcctgagttactattagctgaattaaatagctattggcattctaagtttgaattgctcggtgcagaaccaaagaaaattacactctatctcggaattgataaggggacaggtactaacatggcagttggtacatcccttcaaggagtactagaaaaagtaaaagaactagatatatacttctcaagtgactcagatttctatgcaaactataaaagccaatacctcattgaggaatgggaggtttaataaaatgacatacagaatgaaatgtgtaattacaaacccacaagaaccctttttcacagggggcaaagagtatcagattgctcacaacaatactatagggtactttattaaagatgatgatgggacaaccgcagaatctggaaaaacacgtggtgagctactgaataaattaaatgaatactggtattcacagtttgaactgattgagattgaaccgaagcaaccaattaatgaatgcaccgagattagaaaaaaatttcaacaaacccttattcaatataatatggatattggacacttagaggggcgtttggtgggaaaaccaagtaatatcatatcaacacagattgcaatgttaaaagtaaagcgtgaagcagttcaagaattatacgatgagctgttcaaggaggacaactaaatggtactaatcttagcagtattctggttactggtattaggtggtattctactattactaattgatggagggaaactataatgattaaactaggacatctattacagcatattgaatttggtcgcacagttacattagtagagcatatgacggatgaagagattgtaacattcactttatcagaagaaaaatcacttattgaacaatacgaaggtattgaagaccacttagagctagaagtcatgatgatttctacaacaccaagtgcaggactatatcttgaaatcatgtaaaggaggcagaacaatgaaactagcaacttgtccagaatgtggcggagatttattagagggagcatctaacgaatatggatttgaatgtgacacttgtccttatccatataaagaggaggacttaatttggattacttatactatgtaattatccttacaatggctcacgcagtaggggactatgccttacaaagtgactatatcgcaaaaggaaagcagactgatttatatctactaatcatccatgtgaacatctggacgtatattattgtcgcaactacattgttcttaggaacaccagtaaaacttgggctaattgtagtatgcttatgggttccacattttatcatggactatttaaaagcacaaagtgcatggttcttaaaaacagtacctaataaaaagacacaactaattatcgaccaaacagtacactatctacaactagctgtattcgtatggtttgcaacacactaaggaggagcaagtatggggagagaatatgtaatatctgatatgcacttcttccatagaaacatttgtggggaagcctcttttatggacacacggaaacaatttaaagatgtggaagagatgaacgaatacttaattagagagtggaatgctacagtacgcccagaggacattgtatatcacctaggagactttgcaatgggtgccaaggtaaatagtatagctaacgtcttagagcgcttaaatggcactatatggctaataaagggtaaccacgataatagtcctctacgaaaagagattaaacgcaatacttccctgaatgatagggttcattgggaagacgttggtattatttttaaaacgaatgcataaggttgtgcatatgacacattacccactaattttaggagatagagataacctaattaatctacatgggcacattcatgagttagccagacccgaaccaaacttactgaatgtaggggtagactccccagaattagataaccataaattaggaaaacctcttttattagaagatgcaataagattagtaaacaaaaaacaagtaaactttaacaaagcaaatagagcatactctattcatggtgacttacaatgaaacctgactactcaagtataataggtaaaagatttataccaaagaaaagataccctaggatacttatgaaagaagtttaccctacaagagtattctatgatttcccaagagtacttccttgggagaaagcaccagatataccactaagagttaaatttgttgagtttacctttatacatgagggtagggtagaaaaagaacgatatacctattattctttctttacccattttgaaaggagtggctaaattatgactatgcatacagaaaacttattagccgtaacaatatttttactcatacagatggcagttgttgcttttatttttactaaagggatagtagtatatgatagactactttcagagtacagagacgtagtcggtatagcgtttagtatactcctttttggtaatggcgcaatgcttataattcaccaagtgattgcgatattcagcatatggtttaataactcgttcagagaatctgacgtgtttctagctcaaggctactttatcgtattgcttttactatatatagcactgaacgtatatgggagcactttgtttaaaaatattagagttaacataaaaaattatataaactataatgctaggagtaaaaattataagttagcactggtcatagtaataacatttattgtcaatactgtactagtactagctacttattggctagcagaagtagttaaaggggctattattcattgaaagataaagtatttattgtatcagatatacatggttgttatgatgagctaataatgcttcttaataaacattggaatagtgatgaagaggacttaatacttttaggtgactacgtagatagaggtagcaaatccgcagaagtactgggtttcgtttataagcatatacttaatggaggaactgctttgttaggaaatcatgaccaaatgttattagattttttaacattcccattgataagagaagcagactacgaagacctaagtgagatgtacgcaatgtggatgtacaatggcggtgataaaacaataagtagtctattggatttagatgaacacctacaggatgcgtttaccactagaaagatgttattagaaaaaacaaatgtagttgaagtaattagtttattagaaccatactatgagcatggagacaccttatgtgtacacgcagggatacctgtttatcgtcagcctgattggaaaacagctactaaagatgaaatgatttggacgagaccgctagcgttacagaagaataaaacagataagacaattgtaatgggtcacacacccacaattaacctgagaaaagagaacagctacgatgtcttcttaggtgatagaagtattttcattgatggtgcctgtgcatatggtggtcagcttaatgctgttgttgtcgatagtaaaggtagcttgctaaacacatataaacaagagagcctaagtaagtaaattactaggttctttttttattacaaaggtgttgacatataacaaagtagatgataatatatagacataaacaacaaggaggtagcaagtagtgagggacgaaaaagaggtaaactacttcatagaaactttagcagaagaacgtaaaaaaaagtggaatggttatttaacatcattaagagacagcgtaactctaagtgaaattaggacaagctattctgtgatgacaggtgcttatatagtgtttctatatatctataattatgatttaaacaaacgaacaatagtaaaggctaccctagatgactggcgtatgccttatgtggatttaggtgagtttgagtatttccgagaattagggaagatgtatgatgataaagtaagagaagcgctagacttatatgtaagacagataggtcgttctcgtccagaatctaaggcattaggaatccgtagatacaaagaagtgagtagaaacaaccgaacacaaacacgaaaattcaaaccaagaaaggggcatgtaaaatgaatgtgttaaaacagtatattaaagaagtacactcagtgacaccctatacggaggattggacaaaacatgataagggctttttgatggtagacttaacagtaaactgttatggctctctgtctcggagagagcatttgttttatgtagatgagtgggaagaagctaaagagaaaggatactacatggcatgaataatttaacagcacaagatttattagatgaactattagaactaaaagaacagggctacgcactagaggactatgtagttgtgggtgagccaattaaccctcacgattactacttagaatttgatggatggcacttagacagtaacacaaatatgattatattaaaaggatagggagggcaagacaatggaagataaagactatgcattagcactagaggaagacacaggtgtatggaaagcgtgtgagacgttccctacgagagaagaggcagtgtctgcaggaaaacttgcattattgtccattaatgaaggaaaaacatatgtagatagcttagggatgcacgtagaggatatatttggggcattacctgaaaaggggacaacaagctttgcagtagggcagttcaataaagcagttattagtgtagatgtagtaggtatgttagaatctgtaggggaacagctatacagtgaatatggggaagtagcggaggactactacccaacggatgaagtaagcgatgaggctatagacgagttacatgacattatcgctaactggttaaataagaacttgacacaacccccatcttttggtagtgttgatgacgtagagaaaattacattagaaggagaaaacaaatgaaaaaaagactagaagagctaacaccagatgaattacagcaatatgcaaagttaaataagcaaagagaaaatcataaagagaaaattaaagagcacacagagattattggacatattgaagaaaagattgaaaatatcctatatatcccagaagaggaagaacacaatagtgacttaccgttctaactaatacagcatttaagataatttagggaatgagaaaaggggtggctaagtggagtttgttgagaaagcagaatacgtttttccaaagcctattttagattttaatttaggtcatcgtgtagcaatcgtattaggggaagaagagctaagccatctggaacgctcttattataaaacgaggttatatggtagtatatacctagtaacatcagataagatgagtatagaagtatacaatgaatcaattaagctagggttcaatgacgaggaagttttagggtgtgttattgggtatcctgtagagtgtgctaagtggtttgctaaagcttcgagagaagagttaagtaatagtggtgtaatgatgagtggctcttacacatttaaatgtcctgagcaccttgtagattacgctaaagaatacatgttggaacattacggtttaaaggcatactatgatattccttgtgaaaaaaattgtaactttttcttaatgtatattaattggaggtagataaagtgatttgttttgggtatatctgtcctgtatgtgagacagctattgtaggtgacccggataatggaggagaactctgtcagttaacccatattagacattctaaagtcataggaacaactagaggacattataatggtaacggcggagtagtaggagattactattttggaggtaggtctgggagaaatagtcaagaagaaattttacgctccgagtatgggtttaaagactcctatcgtacaggtaaacgaagacaagcccctagtgggagagaagtaagagcatatgagccacttattgatttaactgtaggctccccagaaagagaatgttttgagattactatagaggggcttaacaaggagctgaaagggtacgcaaatactatcttagctcttgaagatgagctcctccaatctgcaataggaggactttcttgtatagggcaagattactatgaaaaaatgatgattttagctaatatgaaaagtagtagcaatcgttattggctagtgttaagtaaactgtataatgactatatacttacacttccggatagtatggaagctaagtcaggggtcattgcagtacatgtggcttgcttaaaaacattgagtaaggaagagcgtgcaagcttaccatttagtaaaccagacccagaccaaagtataggaacagttagagaagcatatagggaggataacacatgattaaagtaaaagttattgatagcgatacaccttatggtttatctaaggaattagagaaatttttagcaaaccataagcacacttcaattaattattcagtggcatacaaaaaacccctcaaccatttatagcgcccttgtcacttacaaacaagaagacgtttcaatagatagcttatcacccctaaaagctaagggtttccttagaataattagtcttgaggagtatacaacactgaaagggcatcgtagaagcgtgccattaagtacctataaattaaacttaaatgatggagataaaataccaccattttttaaagataaaccagtaatagcaattagtcctactggtaacgaaccctactattcttataataacccagagcatatagaagttaatggtgagttacctagccctcattttgttttttgaacataagggaaactactatgaatattgggaggaacattaaatgagtaaatatattttattttggggacataccccaagcaaacgtaataaactaggaaaagagtgcttgtcacagtggtacccgtcacaatttagtgcacctattaatggtttaggagaagacattattttcccgacagcagaacactacatgatggtacgtaaagcaatgctttttaatgatgtcgatacagcaaaaagaattttaaaaacagagagcccaaaagatgctaaacgtttaggtagacaagttaaaaattttgaagaagacttgtgggtaaagcatcgtaaatcaatcgttttagatggaaatacttataaattcacacaaaatgatagtttacgtaactttatgctatccatccctaaaggaaccaagtttgcagaggcatcacccttttgataaagtatggggaatagggttacgtgaatcagacccacgctctcgtgatatgagtaaatgggaaggacttaatctattaggagaggtgctaacagaagttagagaaaacttaaattaaggagggctgtacaatgatagagtgtttaatgtgtcaagtaccattagaggagacatgtggtgatttttatttagatgaaatgttgtgtggcttgtgtgctatgcatttattactagacgagattgaacaaagtctaatgatggaaatttacgtatcagagctactattagaagaggaggagaatatgttatgagtaactgcattggagaactactcagcaaagaggctatctatgtagatagatttattgtagctagggataacagttattttgcaaatattgttatgcaaagttttcatacgaagaatgtattccatgtaaaacgtaatgatgaatactttatgggaattagagcaaataactttgtggtagagcttggggaacttgattttgaagtaccaattagcaaagaagaccatgaactactagcatctgtactcggtactaagctagacacggcaacgttcgtattagttacaggtaaccataaaggggttcgttatactacaatatgggctatccctaaaacaattgtagataaagaactattgtaatataaaataattaaatataaagtgttgacttttaatctagctgatgatacaatgtatttgtagatagctagatttatttttttttaatatataaagtgaaagaaggtttaacagatggaaaaagtaatacttcacgagaattggagtcttttaaaccaacagagaatcgaaaactattttgggtgtagggggagctaaaggaaatggtcattaacagatatattttatgtattaagtcgttaagtatggaagatatgaggtacgtggtagagaaggtatcttctaaaacagattttggtgggttatcagaagactgtcttctacctcaattgtacagacccattacccttgtatttgtccccagtaagaagtatgtataccaatcattaggggtaactacctataaggacgagaaagcgctagtgtatagctatggtactaatggagatgggctagaccaattattaaaagatatagaggaagcaaaaaaggtagtgacctttgaagaggaactaaaaagaagatataaccgtcaaattaaacgtaaaacaaaaagaattaataatttgttagagcaagataagagagggtatgggtggcatgaactgggctatttgcagggggttgtcacaacattagaagatgtattagacgatttggaggagagacaatgaagtatacttgcataaaaccatttaagacagaaagagtatcagtagatgtgaatagtgtatggtatggggtagacgtaaataatatgtggtatgaattagatgccccttgttaccccgatataaagtgccctaaatatatacttataggcggtagtgcaggggcatctatttgtattgatttgcacactcttctaaataattttatgaaagtagataattcttatgagagtgtagagattaagctaagagagcggggtatatttggtaaagaacacactattacctttgactatatgggttatgcccactttaaacaaagattccttaaacgatttggtaatattagttcagatagaaaactaaaaaagaaattgtaaataccaactcgttgaatgacctagaaagggtattcagtaacaacgataactggtcaattaagattatgaaagagagatactaattatggataataagtttgcaacaaaggacgacagatacctagtacaagttattgtaaatggagaagtaaaagtatctaaaacaataaatggactagcacaggcaatgacggagaaggaaagacttactaagcataacagaagaaacttagttattgattcagaggaatatagagaccaacagaataacctttatgggagcagaggaggtagacctactgtaatatcaataaatttacaaaaattgaataatcaggtagatggtaacgaattaaacactatcatttttgatttagttagtaaattagaagttactcataacctcaagattgcacctacgtactttaaagcagttaaggaaggtagaaaactatttgaaatacgtaaaaatgataggcattaccatgtgggagatattcttttattaaatgagtacacatgtgggtcatatacaggagagtttgttaaagcaaaagttacttatatcacagattatgcacagaaagatgactatgtagtcttaggtattaaactatgcgaaaaataaatgtatatattgagacaacttgggcaggtattggtgaagtagagacagtagaagtacccgataatgctacgaatgaggagatagacgaagtagctagagacgtgttctcttcctactgtagctttggttggggtgacgtagaggacgaggagggatagtgaatgagtagacaaagatataacgaaataattgatagagtttgttatatgtatatggaagcaaatggtgaaattaatttccctaatagttttgaaggagaccttttaaaaatagcgtataagactgcagtagaggcagttaaaaagccagaactgaataaaaatcagaaacaggtatttgaatggttaaaagtaggttactgtagtaaagattccctattcgaggcgctcgaacgtattggggagacctatgaagaccctaaaacagaagaggcatattactctttatcagtaacggaggaagcgcaagttattcaagcatttactgattggtttttagaacagggggagtacaatgattaaatttaaagaatttgatgttggggatatacattacgaagaacaactagaaaaatttcaaaatgagcaaccaagcgccgaatttgtaacaatcacaggcggacaaacaacatatgagaaaatctggttcaaatacactgatgataaggtagaccaagtagaactaagtgagaatcaacaaattgttttgggttggttaaaagaaaaatatacgttaacagatattgaacctatagaactattttggagactgagagccaattctataaaaccagattatcggaatagccctgtttataaaaattatagatacatgacagaaattgcgcagttgcaagtcttacaagcattcagccagtgggctattgaaagaaaggaaagaaattaaatgaataaacaagaattgattaatgcattagaagagttaaagttcagtcacgtcccagtcgttcaagagttatcaaatcggagccagtgctacaatgaggcaatcaaggcggctattttgctagcaaagaaactagacgaacctaagaaagtaattgtgccaaagtttgttgcggaatggtacgagggaaataaacatgcattagacctagctatttttacacaaattagaatgctagatggtaacagctacccacatgaatcggagttcgactgttggctagaccaaagtaagaataaccctattgaaactttaatacgaatgaaagatgggtacgaggtggagaaagagccactttaccatatcgtgtttactggtcttggtaataaaggggaagattgttatctttgggttgacaagtcccacaataatgaagtatacttctcaaataagcctaatatgggtaagaacaaatttactgaacaagaaataaaagaaattgatgaaagatactgggcttttgctgtaccagtgtataaataggaggtttttataatgagctatgaaattacttatgatagcaatactagtgtaaatatacaagaaaaaaattatcgcagtcaataactcagcactttataaagtatgtgttgagaagaaggcttcccgtgtaaatgagaaaacagaagtaaagtacactttagaagtcagctctgcagaatcacaggagagtacaaaattagagttacctcatgaggtgatgctccgactatcagaacttattgaaaacagccttgagttttaaggagggaattaaatggataagaatgaatttattaatctattaggtgatgagattttcactcaagtagggtgtgatggtacgttgaaccctcatgctctaggctacaatgcagggatagcaaaagcagtctccttagcatatggtttagatgagcctgaaaaagttgttattccttataaagtaggggaatatattgacaagtgcaaagaagagaacttaacgtttattaacatgattgacaaaggaagctaccctagtaagatgtactttttggttagctaataacccagaaaaccatgagaaacttgccaaagcatgggtactgggtcatacggtagaagaggaagaagacgagtactacatcattatcgcaaaagataaagatggttggggatacagttatatcgaccgattagggtctcctgactttacaaactacctaaaagatatccctacctttacagagaaagaaatccgcaaaatggatgaacgtttcatggcatttgctgtaaaagtaggtgacgtataatggggcacttaccggacgatgtagggagttgggcaacccactgtatcaaccttgtatgtgatggtgaactgttagaagataagaagagtcggacttatacttgtgaggactgtggggaagttgttaccctagatgaactaaacgaacacttagaaaaagaagcagaaagttatttaaagttctttggatataaataggaggaagagtataagaagaacccgacctatacttgtgaggtctaggaggttgtataatgattgatttagagaagctctttaacacgatactcgtagtattaacaattatagcagtaacgtatcttatatacgttttctatacggcatatgtaaatgcggggtggggcggtgttgctttgcttatgttattttttgtataccttatgattaaataggaggaagattagatgggaacaaaagtagagataccaaattttgttgcacgagcaattgagaaatacgattcaatgttaagtttattagctaatgagtacttcaacacatacgatgaaacaccagatgataaactagctgtatggattggtgaagataaccagtatgtattagcacaagcttatatagacggttatacaacacctaaacaatttaaagtcatcggaaacactcgttatgaccatggttttgacattgggacgatagtggaattagtggatatatacgatgatggtgtttacacagtagtaggtgactcccgctatagcctaagaccagttgagcaagacgtacacccttgtgacttagaagaaattaaacaggagggagaatagatgaagaaaacattagtagacaaaaagcgattggatgcattgaaggttggggatatagtattcacaaaaccggaacttcgagaccctgcactaggttgtgataaggctacagtaactaaggttactcaggatattgtatgggtttcactaaatgggacagaatatggacttcataaaaacgagaaaacaggggtaccactttatcgcagtcaagcaggagagactattggggagtattttttgagtattgaagactttacacaggaggaagaatagatggaaaaaccatacgtagcagttagaagtatccacacaggtagagtagaatactgtacagaagactggctcttctgcgggagtgagagaaacgctatgccttgtaaggaaattagatatgtagacatgttacactgtggcatggagagttactacgaagtgacctttaaagctaatcagtacacttacacagaagaactccctgtatatgcctttacaggtatcaagatgattgagaaggaagagagctaaggaggcaccatagatgaaagtagagcaaggggaattagctattacactccctcaaaatccggaggaaaatgcgactgcaactatttatttctcagttgatgactatggggacattgcaattactacaacaggtgaggaagactatacacagtttgacttcaactttacggaggagcagtgggcagtcattgttgatacaatatccgtgcaactacgagcacaaaaattgagtagttgacataaagtagatttaagcatatactattaaagaggagacaaagatgaagttaaaagatttaattaagttaatgaagcccggagtggacgtactcgttacttaccccacggcaggggctaccataacagttagaacaaagataggaagtaacaacgaagtactagaaccatacttagactatgaaattgctaatgtatccaaaacgaatcattatatcgcaattgacatcatctaaagtaaaagaactaatgttgacttaagcgcatattttccatgctacttaaaacagttaactaagcaccagtcctataattactctatatgcctcttagggcggttataggtattctacctattatcaccctaaacaactattgtaaacgctaggagagggtataggactggtttaacactaaactataacaaatataaaaacggagggagacatacgtaatggcacagtgctatcacgaccaattaacaagagaagaagagaaataacttaaacgagaatacgaggtactacaaagtgggtcatgttggcactgtaataagcctctatggatgtaccctccggatagagtagtcaatttaactacccaattagacttatctatacctaatgagtacacagtacctacacgattacattataaccctattacaggggaacgtatgggtcttgtgaacgttaggtgcgactactacttaaaagagctgaacaagagcttacttaatcattcaatggaggggaactaagtgaaactatctgattacctactattattggtagggggtgtagctatactgctaaacacactcatggtgacatatagcatttattgggggctaactagcggggaatctactacaagctactggataacaatcgtgttttgcacaatgcaggcagtattagtaattagtgcatatatcttgaacataattacttttgcaagcctaaatagaattaacaaaaaaaataagaggtaaatatagctattattaaggaggaaaacaatggataagaatacaaaagaagaattggtaaacgcattaggtaaattttttgggactttagttctagtggtgttgacccttgttattggagggtatgttacgatgttcttgtggaacgggttaattgctccaacatttggggtgttaacacttacatgggcgcaggcaattgggctagatgtatttattagttttattacagctaagactactacaaatacagaagattctattttgatggtatttgcaaaagctactgtatcaacattgttatttatgcttattggatgggtagtaatgttctttatttgagggcagtaactagatgttaaatatttttttataacgtataaggagaaaaaaataaatggaaacagcattaatagacaaagagcggttaaacaaattgaaggttggggatacaatcttcacaaaaccagaacttcgtgacccaatactaggttgcgataaggcaacagtaactagtgtgactccggatattgtatggatttcgttaaatggcacagagtatgaagtccgtaaagacgagaaaacgaaagtacctctttaccgcaatcaagaaggagagattgttggagagtatttcttggacttcgcagacttccataaatactggacatacttcgcaaagactatggcggaacaaattagtcttagaggggagtaaccatatgctaaatattttttataatgtatggggtggatttataagtcaccctgtactcattactctaagtattgtaggtatttatgtcttgggctatgctctagttgaatttatcgttggtattgttgttttgtcgaatagtttaaatactaaatgggtgatagcctctgcgatattcactactgtattgtctattgtttttactatatactcatttttagtggaaatttacgtagtcttagtcgtcattagtggcttggttgtgctattaacctaagaatactaaataaaaggagccacattaacatgctaaattcaagaggagagcctttgctccctatcaacacacaagttagacttaataatttcaccttcgagtgtaatggcagaggtaggagccctatggggagagtaataggttacgataatagtgcgtgtaaagagttcactgactactacattgtggagagtggggacttacaagggtatgcccattacactaatgtaaccgaggtcgtgcttggcggaacctgaacctaataaccaatcatagggcagacggataaataaaaaagaccctatccttatcaacggggaggggtcttttttatatgggagtatttaggtgagcccatataggagccctagggtgagcccttatgttgactttatatgtagggtgttgactttctaaatatataaaaaataattttcctagaaaaataggtacccgagggtcggggtaggcaaatagccccaccccccaaagtacggtcaaaaaaccacgggggaggtcaactggtatatacctataggactggtctagtcctattcggttacctcttcgagttcttcgattaatctttgaaaggcttgatatacttcttctgaatagtcctcgatatccattaaatcattctgtaagttttctacttctttcaatagtctttcatacgctttgttattttccattcttaacactctctttcatttgttttatttatcttacaaatatagaataccaaagttattgctatttgtcaatagattagctcaataattttagcagttcataatatccgcctaaacttcattttaaagccccttattctttcgtataagcgtttctagttatttaccttataattacactaggaagcttgtagctctattgtataagctccctagtgccttatatggttacaatgcaggtttcaagtctttaaactcaattccttggctagtcaggtattctgctacgctctctttgtctaagtccatacaagtttcttgttcgtagtctagttgtaactcgttgttattattatcagttatataaattcgtacatattccgaggtagccgaaacatctaaactgattgtgtattccttgttgtcgtgtttaaaagcatagtaaccttgactataaaagtagttacctaggaactcttgaaaatcgtaataagtttcaaaaataactgggattgcttttgagtagcccgctctcacatctaccccccatatggattgcaaagaatgcaatagtcgtgtctgtattttctgcttggataactttaaagtccatatcacgttctaaaaagccactgtagttatacgtattatcttctgctttaagattccatgtatctttctctagttcctctagtaattcttcataagttgggaactctgattctgcttcgttacctttaaagaattgaggtaaaccgattaagtcattgttaccacctaataaaggttggtttgtgctacctgtaaaggtaacttttttcatctctcccaattctcccataactgtatcatagtcactaacaccaaaccaatcattaagtaattctaatacctcttctttacttttgttttccatttgtttaataaatccgtctttgcttactaacatgtttgttcctccctctctctcttacacctattatattacactagttgtcgttaattgtcaataacttttttttaattttttgttccgtcctcgttcattgccccgcaaaactttgctaagtccattagtgaaggcatgtcgttgtgtttctcaaaaaattcttttacttccttagttgatagctcttttccgtatgctttgccgtaatctttcacttgttcgattgtcatagtaataacttcctctctttatctgataagtttatcatatattagttattgttatttgtcaatagttttatttaatttttttattctttaattgtttcaataattaattctctagcccctgttagtgggtctattgcaaaccctacaactttctgattgtttgcttctaggttatctaaaaaccaatttagctcgctttttctgtgaaagatataaagtttcgttgttttcactttctcattcacccctattctttttgtatatagggaggtttccctcccttacactgattattatatactagttcttgttatttgtcaatagttttatttaaatttcattttagcttgtaacactgccatcgctttaatacattcgatttcttcataacctaaaaacttaacgtgtttagcttctataaccgtgtctgttttacttgatttaaagtaaccacttgtataagcttctgtaaagatgtttcccgctacgtctagtaagttctgcattgttttaaattcttcaaactcttcttctgtaatgtaaccgtctaacatttcgttttctttccccgcaatttcgtagatgatgttaccttttaagattttagagaatagttctttttcaaagtttgtcatgttagtagcccccgttttggtttatttatgtatcagggaggtttccctccctctctataattatatattacactatgttttgttttttgtcaatagataagactaaaattctaatgtatcgatagtagtagaaaatacttcctcgatttcttccgcttccttgtctgtaataaagctactgccttgtaactcattgaaaaggtcaactagtgtgttgcttacccccgctgtatagtcgcttagttcctcttttgtccaaccgttctccttacgttctaagataccttggtaaccgtccttaatttgtttgatgatgattgctttcattgtgaaattcctccctctctatcttataaacctagtatatcactaggggctgaaattgtcaaccccttttttcaattttatttttcaggatagcgccccgtgtctgctagcgtattgctgttatggctttgcggttgcatttgcgggatgtgactaaaattgtccatttgttttttaaattcttcactgtctagcaattcgtctagtgtgctgtattcctcttctagtaattcgtctaatgtatattccatgtctataacttcctctctctatctgataaacctagtatacaatatagtttgttatttgtcaatagaaaagatgaaatttttaattaaataacaaaagaattttatacccttttaaaacctccctaggggaaaagtacacccctatttcttataaacgttgctacaataacattcttattttagctagttaacctagcccaatcagtaaaataacaatgtgcatctatcccccgtttgtttttaacagtctaatctactaactttctgcccctcctccttgtgtattctaatatatgtataaatagcctatgcatttaaagccccctataagcccgtataagcgttcctagtcgttcccctcataattacactataaacagtataagcgctccctatatagaatataatagcaatgaatgcagtaataggctagatgattaatagtgtaagatagctaactatataataagataaacgcccctattttcagatatttaaggataatcatatataaacagtaataactatacttatttcagattattttgaaatagacttatgcgcccccttgtcgggtttctggtgaagtcgattctttaaaatctcaggtaaacaacttttttttcctctttcctctttcctctctctctcttattcctttattcccttactattgcttgttaggggctatctgtatataggtacataggtgtataagtatataggtaaacaacttttttttctttattgccttattccttattgctttctttctccctcttctttcctttacctcctcccctcctccatctcttcccctataagtgtatatagttctatagctctatagttccttatctctttacctctttatatgtttatttcttttcgtcctgtttattatcgtacactatcccgataactgaaaagaataatactatccctaagattgctagtaattttaaactgtatacactcattcttttatattcctttccataaacttattatttttacatctttatccgttagcgttctttttaggatagctctattccctttttctcttaaggtaacctttttcattacagtatagtttgctattccatcatattcgttcacaagaataagactgatgaccttttcccctttttctaggtcaatagatattaaagcaaatggaaaaactttattttctaacctgattgtatacccttttttctaagtactttttcacttcctccgaaaagcgtttctttacgttttctcttcttacttcttccactagttttatttctttacttctttttacctgtttagcttgtttattcatgaaactattcatctttgcccctccttatctgattacatcaaaacttaacgggttttcttgtgagtgtttagcattttcatcatataatgaaatatctttaataggcaaagagtttccattttcaaaagtataaataggcaagtccttattttcttctggcacttcttctagtttcttaatcaattctctaattgttagcccttttaattgttccattcttcttgttcctccttaatagtgtatacgcttcttacttgttgccatgccccgattttacgatttgtgtgagtgaaagcaatatagattgcacccccgaaaatgccaaacatgccaaacataaaataaaacattagaataactaaaccaatcaccgaatattcttttgttaaaatctggctaacgaaactttctgcgacttgtaaagtgataacttccttttgttggttgttctggttcatagtaccatcattaaacttctgattccattgttggttgtttgtgtttgtcattgtccttgctctccttttacgaaatggaattcgttgttatttgcatattctttcaatgtattaatcattttagcagtttctacttttttcggtgtctgattcttttgaaattgacttataccattcttctaatgtttttgtttcatctccccaaaaaccttgtatatcttttctagtgagtttatctgattttttgatattttttaacatggcactacctcaattggttcaattccattattttctagtaattcatttacttctaaaatagttaggtttgtaaagtcaatacctgattcttctaagaagtcggctagtgtttcacctaagaaagccgttcccccctttccctgtttcatcatctcttaaaattgtgtttagttccttttctgttagtttcatttttataacttcccctcttcattctttattattaaattgaaaattttacaaggtatttttcccgctaactctttactagcttctactttaaagccttgttcttctaaaaagtttttagctgtttgcacgttcttttcagttggtaacaagttgcaagctctcaatactttatctaatattgcattgctttctttctttcactgcttcaattgttgttatctggatataatagaaaagtgccgaccccgttcttaatgtttttctctgcttcttcttttgtaacttctttcattccttgccatgtataaccgaatttttctaatgtttccatgtttagcacttcccttattttatattttttttctatgtaaagggaggaaactcctccctgtttttctaatctattaaataaggcacttctttttttaaacactcaataatagccttgttcacttcctcggtggcttcctcgttccataagtctttatctaattttagcccctctgcaacatctgctaaaacgtcattaaaatctaatctaccatataaaaactcgtgacctttaatatagtaaagcgtattggtaacctccgtcgggtttcctaggtctgtcaaaacctccccaaaatttttcttcttcgtattcttgtatttctccaattgcgttaaaaattccatattcttccaagtctttaatgtcagcatttgctccatgattaaaaatctcaccatgtaagtcgcaataataaccatcaaagccattttctaaagtgtcaataacttctttcattagctctttttcatttaaaaatacgttgttttcttttgtcatgttaaaaacttcctctctttattttataaacctattgtatattagttattgttatttgtcaatagtttttttataaactttttgaccaacttaaacctttgtgcatatcttttaagaaaaatggttgtttattgattaaaataaaatcgttccctgtttcttcttctttgcgtagtttagtaaagcatactgcatgtcgttcccccacaatttaaagcataatatacccgatttttatttaagtcaatttctaaaatctcataaatgctaaacggtgccacgtttcctagttgctttttatcctttccacttgttgcaaagattgcaactcctattgcttttttatattgtagttctgtttttgtcatctttgccattcctttctttatcttataagcctattatagtctatcttttgttatttgtcaatagttttgactattcaattttaaattttgctgtaaaatcatcatcattgctatctgcataaacataacaaaaggtttcccctgtttctctatttttctctactcgcacaactagattatctccatctagtataaggtatcctgtatgctctgaattattaatttcttctgtttttaacattttttttgccctcactttttttttctaaaatgtaagaataactctatttcttctaatgaatagttaccgttgaaaataaattcaggtggttcacctctttttctcttttctagctttctgattctttcatattgcaatttttttattctattattaatagtaaccgccacccctctttatattatagattataagcaagcattttgcaagccttttttataatattttttgagttcttttctttcttcttctagcgtttcaatgtcaatagttacgaggtacgtacaccgttccattggataactagtataatagcttaatacgttccccctaaccttataatctgtaatacctctattctctgcaatgtttagtgctttttcctctgctgtcatctcaagccctcctagtctatgtaaagggaggaagccccctctattatagataatctttttcaatttgttttttagtgtctgcttttagcccgttttgcttaagaaattccttaatatgtcgtaacgttgtttgtgagtacgtaccgaaaacctttgctagtccattagtataaattgtcgcaacttttgtatcatatgaataaagagaaataccgttttcctcttctactaggttagcttttccataaaagctctttctgctgtcgtaaatacattctaattcattcatgttcataacttcctttctttatcttataaatttataatacactatagtttgttttttgtcaatagttttttttaatttttttttatttgtttttccctgttccttgttcccagattccttttaaaccgaaaacataggcaaatagcaaaccactgcaaaccgttaacgttctaatatcccaaccgcctaacgctctgaaaacttgtaagcaaatcataatgctaaggtagccccaaagtagcacaacgctaacaagcaaccccattagaataatatcagataatttcatatttaaaacttcctttctttatcttataaatttatattacactatcttttgttttttgtcaatagataaaacaattttttttctatgtagaggaggggaaccccctcccttaataatgaatggcgctgtctctgtattgttttacatctctttgcaatacgtttctagcgtggcagttatgtgcaacaattcccctagtgcttgccgtcatgctgtaaagctcgtagaccgtgccatctttcattgtaacatattgataaacgtaacacccgccgtaaattctaggacgtgattcaatataataagattgtgattggtcgattaaactagtgtctaagtagcccccactacgccattctgttggttctaataaatgctcttttttaaattgttgttctgtcatgttcataacttcctctctttatcttatgaattaagtatatatcaattgttgttttttgtcaatagttttgattaaatttttttttaaatagttttccaactatactcaataagcaaatcaactataagatttttcaagtctgaaaatagtaaacctagttcatattttttctctttcttcttcattgtctgccacgtcatctatatcaatcaaaaagtcttttcctgtttctttttcaattaaatggtagttcatatcccactcatttaatggatttttaattaagtataactcattttctgcgataatcatgtttataacttcctctctttatctgataagtttattatatactagtccttgttttttgtcaatagttttgattaattttttttaaataaaatataaatagccgtttatgtcctgtataacaaggctttcccctgatttttcttctaattcctctaagtcacttttttctagtgtttcggcttgttcctctataagttcggcacatgtatatataaacgcttcgccttttctaaaatcatctgcaacggctctcacatcgtttataaacagtgagaaaacattatccatactagttgaaaaaggcttgttataattctctaggtaactttttagctcttcttttgtcatgtttaaacctctctctctttatcttatgaattaagtatacatcaattgttgttatttgtcaatagttttgattgattaattttaaatttttatttaatgtttctagttcgtttattgctttcttttgcatagtgataatttcttttacttctttcttgtatcgtttagctttcataagtctttttagtccgttcatcatgtaaagcccctcccttgtctacatttatatgttatcatggttcttttaacttgtcaatcttttttttatgtaaaggaggaaaatttttcctccccttattctactgatttttaaaaagccgtctaggtattcttttgcgtatgctcgttgttcgttatcccctagaaataaatattctaaaaagttgtgggttgtaataggtagcacgttatcaggtgcaataacctttgctgttagctcgatacctgatagcattccttttagttcgttaaaagctgataactgtcctagcaaaccacggtttaccattttaacctttaaatcgatttctttataaaaagtaacaataaccttgtttagcacttcttgttgttcctcaattttattattccattctttcactgcttctaattcattcatgttcataacttcctttctttatctgacaagtttattatagtttatcttttgttatttgtcaatagttttttttataaattattttaacagttcaataattccattagaaagctgtccccaaccgtcacacactcgaaaacgtccgtcccctatcggttcagttttaacggttgccgttgcatattgtccgcctgtttctgcggtactatcaaaaataacggtatttaagaaaaccataaatcgaggttttttcttttgtagctgtttagtacttaaacattctaccgctaaaacaccacaccgattttttaattctttttctttttcttcctctgataggtttttaatatctgcataggtaaatttatacttgttcattttaatagcgcccctttatctttatttttttattgttgttgttccttacacgctctatattatactagcttttgttttttgtcaatagaaaagtttatttttttttaaattatttttttcttactatataaaggaagaaaaaccgacaatctagggaaggtagctattaaggtgaacccgcatggcttgactctccaccgctagccgggcgcatccggattttgcaacctgctacttagggaattttgcaacctgctacttagggaattttgcaacctgctacttagggaattttgcaacctgctacttaggagattttgtagcctgctacttaaggtaaaagaaaaagctagccataaggctaactcaatcttggtaaggtattacatagtgacccttacagaaaccatttttatatgtgtctcttgcttcaatgataatacctactagcattgcataagctttgttgttatcctctaagaataaaacatcgtcatggtcaaaactgaacccttgaattgtagataagttatcagagacttctagcagtttacctcctcgtagccacccattcagttcttctttaaagtggttgtatcctgctactaggtcttctctagttaactctaggaatggtttatcaggtccatctgttagaacgtaaccttcacttaaggcagataaagccattccccaattatctaattcgtcaatatcatgcccatctcttagtaacacatcataaatttctctatctaaccaatctccaattgtttcaaactcgttaacgtaactcatagttatatcccccatcctatcctaaaccaaagtgcatcctaagtctatcctaagtttatcctatcctgtatcctatcttatcctaaacctatcctaaacaaaagtgcatcctaagtttatcctatcttatcttaagtctatcctaacatatctaaacaaaatagtcaatagttaccttaccaaaatcctctggctgaatacgggatacctcactagtaacaataagcgcattttctgggatgtcatctactaaacattcaataatatcctcatcgacagcaaacccgtgcttgttcactgcccttaacgttacagttgtcataatgtgcatagcatctaggacatcacctagtttaagaccttctacttgggtatcataaggtcttacatggtacactggcacacatacttgtttgttactccgtgtgtttaacaggtaatacttagtcttcttattagagaaagctttagcaatctccattacttcttcgttgtagataactttaccacctaccgctaactcataaaaatcagggttcttatttattgcaataggtttctttaatgttttccctaaatcactcggcatactcatctaagtacctcctaccggttattatagattgtttcaatgttttttgttagcttctctacttcgttggacacctcgtctagctctttgtgaagaaggtttaaatcatattttatctcattcaatatcagacgtttagtagaggcttttttatttaacgtagcaagcaaatgctctaatgcaaaatcagggtcagctactttatttagtggaatagcaatcgctacacaccaataagaatcgttctctttaacagtgaacagcccctttgcaatatggctcatatctttatcataatgaacaactgtacctgctagtgaagccatttcaccggtaatgtttaaacactgtacttctgcacctgctaagcctcgaacacctctcttaaggtcggacacgactagtaatgggtctccttcttttaattctaataagggttcttccatcacagcgtagtcaatgcctaaagcatccatttcgattaaggttacccgactaccttcgttattgataatataccaaccctcattggtggttttatacaatggatatgtgattcctaaactcaacctagcatccggataataacctcctacagccttaagaaggtctccttctctataagtcttttcttcttttttatcttttttaaacattagtatttcatctccttaaataaaatctgataacgacagcccaacacttctcatataacaatactcaatcttcactgtatctttctaaagagaaccctttactaacactatgccaaatagtaagttttttaggttctttttgcataagatagtgccaacaacttgctaaattcaatgtttcctcatagagtcttgattctttgcactctgcaataaacttctctttatcaagacctaagattccgcatacctctttaataatatctctattctgctcgttatccgcaacgtctacatacaataccatacctgaatcgtaatctgaatctacaacttctacctcatttaaaatagctaaaactttcttcattcgttttttaatctgtctctggttcatgttgttgtcctcctatttaattcttccacactttttacattttaagtatccatggttatctagtgttttgtacacacctttaaccgtgtagtcatgaatacagaatgtttctttccatgcttgtttaaaccataaaatgaaatcccctaccatcatagtccctccttaatctagttattttgcgcttcttgattttcaatataggtgtagcatgtatcaagtgctacctcaataacagcttcctctgtatgagggctcattcccccactctttccctgtaaccttagttagtgtacggtgctgtccgttccttacaattacaaaatacatgtcttgttcagggtaataagtgataataatttcaaattctagccccttatactctctgctatacttcttttctgtttctttcactctatgctacctcctaatattgtttgtttttttatctatgtacctactatagcatggactatagtagttgtcaacagtttatttcaaaatagtaatatggaaccctctgttactattgaggttaacattaaacaccttgcaacctaataaaggtacaattttttcccaatcctcggtattctttgtcccatattcccacttaaacgtgtgactttctagtggctcgtatgttctcttactacgttccatcactacaacatgtacattatacactagtgtgtctagtagttcctctaaggttactccgcccaattcagctgacttagtttcataaatgatatagtgccattgagagttagggtctactgagtgagacactacacgttggttgctacttaatgagtctacaaactccgctaagtgttcataccctttaactatttctaatgatgtactgctttgtggattgctagggatagagtcttctgctttatcttttgctaccctaaatgttacccccaaagctagccatactagagataataagagacacgctatctctggaacaagtggtaccttcatcatcgaggatatatactttacctagttctgattcaaacacagggtaaatattatctacagtccattcacctaagttgtctttgtcttttgaaacacattctaatctacaaattacatttttacgcatttaaatctcctcctataaatattgtttaatagtatacaatgcttcttctaaagctattgactcatcttgcagttcaattgctctagtacttaactcttcactcttctcgaacaactgataagattcttccgataaggcagtaatcttagcctctatcttctctaagtcagacatgtcatggtttagcctaggttctgcttctgagggtgtttcatctagtagctcaaatttgttaccgccactattgataacgtccagtagttcttttatggatttgccactgctaccatcttcctcatcatcccagacccgatagcgaccatcagatgtaaggtttatctcgtagtctttaccttttgtccaaaaggggtgaactgcctcaacacatctaacagatagtgtaggttcttcttcaatcttatctaacatgtcctccgtccaacaccaatcttgatgtgtaccatcgatgttaataaagtagcgtacgttactcccccaaacacgtgtaatagtagcctcattacctgcatagcctagcatcttagaggttatgtgagtcttatattctatcccgaatgcctgtaaatcattagacactttcactcgttcccctactttaaacctaggcttattcattgcctcttcttctactagtgtaagctcaaccttattagtggcatactcctgctctatattcttaagaacacctcgtactgtgtcactgctgaatctgacatgaccatagttgtcaataatagcgtagctaccagttgtcataattctacgaacacggtaacgcttatctgcactccaacttgatgcaaaatcttctaaaaaattaatataataaatcattctctcatctccttaatagatgtaatcataaaaacacttagctacatgtactcccttagtacctctaaagactcctctaacttacgagcttttgcatttaagttaagtgcttgttcatttacacggtcacgcttagcaaataggcactctgcctccgtttttagctgttcaatatcagctagaatcttagcttctacatctagctcttctacgtctttttctccatcatttgatggctcatctacaaagacaaactggtctgggagtaacgaatggttccctagtttactattaaggtagatacgcacacttcctgtagggaactctttaagcacttcataacaatgcccaacctctacaagacctctatcaggagggtatacacaagttaccttagcaaatcgtacaggcttttcctctacaacttcaaatttaattttgctgtcaccatttaacacccctaaaatatactttacggttctgtgactcctttcaccttcccctgcgataactaagccaaggtctttattacgtgttacctcgtaaaccttatcaacttcccagtaacctacattactattatctgtgcaacgtaacttcataccttctttaatgtctttctctgtgtactccacttgatttactcctcctcagctcttttatgaactactcttctaattcctactgcgtatactttaacatctccgctagccgtttctacattaaactctcccataacatactcttcatatctactatctgtactatcaatggcaaagtcttttctaagctcattgggatgtggtcgtttctctgtctgatacctctgccaatcagggtaatcacgagaaagaatgtcaaatactttatcatgaaatactttaccatgaaagttcattctaattcacccccttgtgcttttaagaataaccctgtataaaatttactgtaaacctcaagcaattcattctcacttaaattactgaaagcagaatatgcttctggatacttcattctacctcctgtggattctaaaaaacctactgcctctgttacatgagttaaaccacctactgcgtataattcgttaaaccaattaaggaacaatgtctgtggttcatttaaccacgttggctctacctcttttttctttaactcttttttgatataccgaattgcattgtttaaataaacttcttcggtgtcacgacttttatttcctagtagtactcgttcaatttcttcaattgcactctctaaatatcccattaattattcctccattccttttttaaatattaattgcaaccatgtagcgacaaccccaattaccaatactacaatgtccagtagtacgtttcgcacaatccctagccagtccccttcgtgtaccatgaaaggtaaggaaactattgtgtataagatactgaacgtgataagcaaccacacaatcaccattaaggcaactacaaaccactcaactaatttctcatctttactcatctagcttgcctccgtttaatttctcttcgtcttcttcaataagtaattgtgtgattgtgattactccacgcatatttttaatatgtttagcaaattttttgcggtgaataccaaatgcaatagcatcataagcacctttaataccttctgctaggaaaataacccaaatcagagctagaaaccatgtggctacattatctggtcttacattcttagcatagtttacaaaggctatgacagctactgacatgataacacgtaatatcccattaaacattatccaaaatgatgcttctctcatttcgtaactctccaacattgaaagtttttgtctaatcagtgtatttttaagttcttctaattcgttcatgattaagtctccttcttagtagtatcttaaaatttctcttccattcccatagatactagttcttcataacaatgttcacagatatgtttatctttatatgggttaccttcattctcaaactcaaagtagtcgtcccacatatcaaagtagtcatcacaacgtccacaacgagtaccctcgagagctgtctcaatcataaagtattctcctccacaatgttcacactctgcacagtccccttcttcgtactcctctccttcgtactcttctctacattcttcacaagtagctaatactacccagtctacctcctgcgttacatcaataagtcccattgcaattagtgctttgtctttttcttccattgtcatttcctctacttttttattcataataagtccctcctataggtctattccaatattttctaagtaatcaagtaagtcctctacgtctgatagtaagatggcttcctgttcctctaattcttcaatttgtttacgaataattgatgattcgttaagcttatcgtttatctctttgttagcatctattactctttgttctaatgttttattactcataattgccctcctcgtttaactatctttttcacttctaaaactactttgtagacctctgcaaatataaaggctagcccgcctaacagtaccgcaacatatagcaaatctactgataatatcataggtaaggcaaaccaccctgcacttgttaaaaatgaataactataataacctactaaaacacctgcaaatgttaaaacaaaaacaataaaagctacttttgcagttgtcttaataacagcccctgtgacctgtcttacaatgttatctaccttttcagccttatccatggttacacacctagctgttcctctaaaccagttaaatcaatattgtagtagtcaataaaatctaacaagacatctgaataagactctacaatttcactagcatccattgcctctattagctctgtttctgttaagtcattgaagtaatctaagtctccttgagaaagcttgtcttctgtatctcctaaccattctgtcattacttgtaacttcttaagagggtgcattaattttaattcttgctctacatgttcttttactaattgtttatgttcttctaaaaactcaatgtccataatatccattttattttcctcttttcttagataattttgcaaaatcttttagtaaattacttggaatatttaacacagtaactagtgtaccttcactgctaacaatgaagcatttaccattatataaaatacatgtttgagggtacttagagttaaatactcttgatactacccatttctttagacgacctgttagctctttttgtctgtatcctcgttctaaagctaactcaaattgtcggtctacagagctcttattcactcctacacgttcacgtacacgttttttctccatgtttgcttacttgactcatttgtttccctcctttatcttatgaacttagtttaccttatagtttgttaaatgtcaataggtttatttaaaaaaaaataatataatttgcaacccccaattaatgagggtcgcaatattatgtttcttacttattcaacaatttttttaactactagtgccactacaactgttaatgttacaccaccgaacccaacaagcccatagttcacctctgtgcctgtagatggcaactctttagcaggttctgtagtgctagtatgagtttccttaacttctttagactctgtagaactagaagtagactctgtgtagcctgctacttgagaagtttctgtagtttcaactactcctgaatcagtagaagtgtcctcattggtcactgtttgctctgtagagctttctactgtactttctgtagaatctactgtagaggacgtagaatccgttgtagagctttctacagtggttgtatccgtagtagaagactcctctgttcctgtagtcgtatcaacagtagacgattcttctgtagaagtttctgtagtaacagtagtattagtaaacttcacaggaactgttagtgtagcttctcgttcatggtctttaacgaatacgtagatagctgatgtgtccatcccttgttttccttttacttggaaagttactgaaccataaccatctgcatctaggtcacctaagtattccgtgttgttattgtacacacctacctgtgcaccttcccagaacttacctgtagataatgttgctttaacatccacagtgactacttggtctcgttctaaaaatacaccttcacgactaactggctccccattaatagacgctgtaacgttcattacagtttgtttaatttctgtttcgtcactaaagatagctgacattacacgaggcatatccccctcatatccagaagttaatgcaaagatgctagttgttacttggtcaggacgaccattaactgggaaggtaacctctgcattaccaaattcatcaactttactcttataatctaccccattattacgaataatcgcataagcattttcgggtgtaggctcattgttccatgtcgctacatgtagtttaaaagtaactacttgacctcgttctaccacatagttcccattatacaaatctaacccatctgctactacatcaatatttgttacgtatgccataataaatctctcctcttctttatcttataaacttagtttacatcatgttttgttatttgtcaatacatttaactattttttttattttatttcttccgtacctgtataaggtagctttaacgctcctttatagtctttcagagcttcctctacttttggtttagctttagattttggttcatcaatataaattgcaatatcaccttgtggtctaaatataatttttctaccgttatcccctacacacccattatggcagtagtaccgtcctcgtgtatacatgtatgtttccaacccacattcagggcaagtactatggtgtcggcatctgatggctcctagtgtaaaagaactataaatatactcttctttcgtagcgccactaggtgaagttcctgtcaaacataaatctttttcaaagtcttccccaccgtcatggtagttgaacgttggtaggtctcccccacttaaactatttaaataacaaagtgtatagtggatagcttcatgtctggctacatccattaaaatatcaagcgctctttgagctaagggtgtttcttgtaatagaataacttctttaacaaacctaccatttatctctatacagtgtttgtttgtgttagtgaattggacaaaagaacctagggttcttcttagcttaccattgattacaacatttatttcaggtattttattcccatggtagtctccataagcatttacaataaactcattaacatatttagcaattttgcctgtccacagttctttctctttcttagtcaatgccaaactttttacattcttaaattcatacatttctatgtctgatttaacatagctgtcagccttaacaacactaaacatacctacacctcatataaccaatttactcgtttgtcttcatctgatatactgtcatagatattatacaagtaaaggtcaatttcttcatcaattctactattaatttcttctctaatagcctttaatattttttaaaattagtctgccttctttaactccttggaagttatctattgcaaacaggtcaccggcttttttataaagaccgtcataaaggacatctagctcctccgtaggtcgattttcaattgtttggtacaaatagttgtaataatctaggctccctctcatgatgcccctccttaatctgtaaagctaatagctaattctcggtgtagtgctttgctcaacttcatcataatacgtaatgttggtagtcgtttaccttgttcaattaagattaatgttgagtggtctacttttgctcgttttgcaagttctaatcgagatagctcttggctctctctaatttgtttaattttatctcctagttcacaagcaaatactgcctcgtcctctgttaattttgcatatactttcttttgttcattcatgtgtatctctcctcttctttatcttataaacttagtttacatcatgttttgttatttgtcaatagttttatttaattttttttctcactaattaattctagtgagaaatcattttgaagttagcttgttcttaattaattgtagtttagcttcccttaccagattagggctaaacaattcagaaccactgtctaatctaggtacctcaaggtctaacattgctaagagtatgtctacttcttctttggaaaaagagactgtaatcatatcggatgggttgttgttctccattccctttatcaattcttcactcatctctatttcatctaaaataggtgcaatctctttcataaagtaagactctaacttttcattcttcatcgttattgtgcctcttagagaactctgcgtactcttctttcatcttttctcgaaattctggttcctctagcagttctaacaaggcatccatcttatctatcatagacatattgtcaaactgatagcctctagcttctaatgcttcttttgtataagacatactatccctcctgtctatcatctactacgttaatatcatcagtatttactccactatcagttaaaaaaattcataaactcatctaagtatactacttcatcttccatagtagccctcctatctataaatacatactaacataaaaagaggctttatgcaagccccttttctaaattatttatttaatttttaaatctggtgcgctactgttcttttccggcttattgtacactaaggtatctgagtctaaataaagaactgatgaagtgtcttttaccttacctgctatacctaggaaacgagtccaccagttgttgtttatatagttctctgtaaacacaattttaggcttaacctctcctttagtagataggatagtagtaccttctgcatcaatagctaccaaaccgccatctacgttaatctcaaactggtctttttagcctctacaactactttactgttctcatagatagggtgtaattcatgacttttcgttaccccatgacttggtgcaacatcgaaagtaattccgaccactgccagtgtgaaaaaagtagctacagcagagcctaccacaatactaaataaccatgaagtccagtctaggtacccataactatcatacattccccataaagcaagcccgcctataaatactgctaaaacaataaaaaacaacatgctaaatcctccaatttttttttaaaataatagtaaacactgtctagttattccggtgactacagtaagtgcaatacctgtgaaaagtaaagagtgcatgcctttagctatatcattttgactacctataaggagtcctagttgaagtagagctacggaagccatcccaaacaaatatagtaagaacatggatagcattgtaataatgctaaatataaaaagaatcaattaagttcctccctaataaaagattaggtagtagttgaacaccactaccttaatcattgttatttctttgtacgtcctctacgtggaactcgatatttatctaaaagatagaacaaaccatttttatataatttgtatttagtataaatatctactaaacgagtaccgttcttgtagtctcgaatgactgcgtttaacatatctttgtcattttccacatgagccactcgttctgctactttagaagatttaacgtctgccccatttgcatataagatagagtataaagctcccatactaattccgtatttacgagtaacgacatacgtaggtagaccatttgaccagtctgccaatagcttagcagtgtcttctgtagatagtgagaagtcatccttaccctcttcttcctcttcgactactacagttgtttcttctgattctgattcttcttctagtactgtatttaaaagattggctaagaagtttacaatgccattaattgcatcttgttcttctttacgagtttcctctttatttttaattgtaaagtctaaatcagacaacccgtaagtcccataagctagttcaatggacaagataagatagatagctgttacgtcccaaccataacctctattgctagcccgtaacaatgattccatttcttctaacatatttaggcttcctgcgtagaataaaccttgctctactgggtcggtacagccgtccatatctgcttccatagtgtccttgatacggataattgtagttacaattgcatgtctatcaacgtcttccgctaactcttctgcttttaaataagcttctaattctggtttaactgtatggtcaaactcttttagagaatctttagccattctcaaccctttttcagtttgtgggtgattctctacacgttcaagtaatttgtctcctgaacgtactgcatagcttaacatttggaaagctctggtatcctcacaagtctctgtgtggttgctatctgtttcttcctcttgttcaaatgatgaatcaatagtagagtaagaagccatacccatcgcctccacagttttacgtaataactcttgattatcttttaatttgttattgacttccaaaagttcctcagcatgttcgttctcaaacatggcaagctcgtctacttcttttgtaaagtcttcaacaccatcatcacctgtatttgtaaagatgtcatctaatgactctttattatctgtttcagagctatctccgtctttagagtcgtctaatgtcccagttaattcttctattctaaccaaaccttctgttctaatcaggttacctgctccgacaacataatggttaacttcgttaaagctatcggtaactcctgcatatagcaaatgtcttgcaacattacctaatagaacctctgctacatctaacttgaatctctcaaagttaagctgtagctctttaaggtgttcatcatcttctgtattattaagaacagctgtagtaaaaatagttgaccaatccataatcacatcagctaaattgtgtgtgattacatcaaagtactcttcctctgaatagaatttttttaagttctctacctgcatacaaggtaacaatatggtctgtagtagacatgctatctgttactttctctaattcgtctagcacacggaaaggtacctcatggatagtgtctagtgacaagcaattaactaagacttcccaagcttgcttcatgtagtcaaacccaagagtttcaaaaaggtcttctccaacattatgtgatacagctctcattaagccacctaaagataagtctaattcatgtctaggtactgccattttttttcaaaacatcttttgataattcaattgtcatatctacatgatgtttttttagggtcgtattctcctcttagttcttcaatagcatctctaaagtacattaacatcaatgctagctcttttgcatctttaaccttaacaattacttcctcaccaattacataaaacgtaccatttgtttcaataaactttaaggcatcttcataggtagctaactgatttacttttgtagtcttaatttcaggttctgcgccttgtgtcttacgcatatcatctaataagttatcccatacaggggtgtattcaccagtgtaagcatacactcctttgtctaaatcataaaaaacaatgttacggacaatatttgtcttagctgatgaatcgtgcaaagtcagttttgcatacttcgaccgctctttatcaaattcaatagtaactttgtcccctttatctaaccactttaatgtgtctaaaatatttgccatcatggcacctccaaaatttattatcaatatccttgatatttatactataacaaagttatagatatttgtcaacaataaatttaaaaaaaaagaggcaggcttacaacctgtctcttctaatctcactctctgcatatatttcgttatctctacttaacttgtagtaccacttattgttagcatcgtctttgtatacactgattacaatggcggaatctttgatagagtcctctttacttgtgtagtaaacagtgtcccctatcataaatttagggagttcatccgtatttaaatcatcatagataaaacatgggtatgtgctaagggcattaattggcaaatcgtatatctgccaatatcctgttctccaataaccatccgcaggggttgtatcataacttatctgcgtaacaggtacaacaccttctgagaaaatccttactagcacatctaacttacgtctttgttctagcccttttacaataagggtcttcccttcaagtaatgcatgtaaactttcttctaaggttaacgttttataatttacctctctcaaattttcaaccattataaccctcctaaattatatccatacctgatgcttgcaacgctttagtgattctttggtcttcctctgttaaatctaagttttcatagaactctttctctgctgattcaattgcgttgaatacctcttcatgctgttcttctggaataaactgtagaataatctcagtcattgcttgttctttagcagactgtcttaatcttagctctcttaaacctgttagacttagaccttggaactggttagctgttatcttagcttttacttcaattgctttcatagcaagtggggcttcaacatagtctacctcttttagagagttaaaacctttttgtatgattgtgtctaacacctctacatcattgtatatctgttccacttgcccgaatgtgttatcgtatgtttcattaggaagtggtgttacctctttagacttaatatcaataattttacctgattttctacgtttgtcaagtagtgattccaagtctactcctgtttctaaagactctcttcgtttctctttgtacctagataatgcgggtttattaatttcaaaatcgaacttctctttacaaaaagcaataatgaaatcgtatggtttaccctcgtctaacgcctcgtctaccttagatacaagcaatttattattgtatagattcagtaatactgaactgttattcacttcttttttagccattttagttataaactccttcaacttttaattatatgaaatatcatttttaagggtcgaaaccctttgttttattagcttctgtaactaatatagcagaacatctgtaaaatttcatatgtaattgaaacaagcaaaaaccccacatattagtagggtttttgtaactttaacagctaaatcattatgaaatatttgtcggtcaatatcagctatctaaaataagttgttttacctaataatgaaataacaactgtttagtgtacttttttcattgtgaattggtctatacacacctcatatttcacctttttaaacaaatgagtacttaccaatttctgctttgactagccatttgtctaagaactcttgctccttatttgtcaattcacggttagctagtccccttgcttgtactagtttattatttttttacctcaaaagtaactagactagtgtctggctcttgcttgtctctcataaacaaaatacgagtagaaccttctgccacttgacgagcataagtagcaacacagtggtgtaaactagaaccttctttagttaagtcttccacactatcaggaactttaacaatatagttacctctaactgatacttcttctaaatctttatatttagctacgctacttgcaaagttattattcaatacctcatctttcattgttcggtaattcatattaataatgtcatgagcagtcttaagagctttagggtacttaacaggtaccgcattcatataatggtgtgctctcaagtagtctctgtatgtgtacctagcctctgcttgtgaagtaagtccttgctccacgtatacttgatagtagagataacgaacagttctatagaagtctaggtttgcaaccatagaaatatcataagtagttgtactgttatattcatcgttaactactcctgcaataatatggtcgtatataggttcccactctatttggataatatctttactacgagagataccatattgttcgtctagttctttagtaaactgataaaggttgtacaataccccaccaaaacgagcataggcttgtcgtagcttagcaacctctttctctgccttcttcatagcagtaggagattcaggggtttttacaatacttctgttatccactgacttatggaaacgactagccatttttttggtagaatgtccactctagtccgccttcacaaataatcttgaagatagactttgggatacctaagtgcttagtcggatttgtttgttccttgtctaaatagctcacattctttataggttcataccatttatttctactttttcccttcacctacaacaactactcgataagcgtaagccaaagcaaagtctttagggacaccgctcttgtaaattaattcaatcttgttatacttcatcaatcggtcaaagaaacgagatactttaccgatttgttcgtctttcacccgactaactcgttcatacacggacacatacatatctgaaccagacattgtatctaattgttcaagaatattctttgctacgtgcccagaaaacatgttactaatgttattttctgagaagtttagtggtttaccattcttaatcagcacagctaccttatctcgtaggttatattctagctcatatacacgagatacctctcgttctaaggtctcctcttggtctccatagtgtactttacttactaccgcatttaagatgaacccataaggcataatcttatggataaacaagtgactttctaggtagaaacgtcctttcttatctgtgccacgctctgtataagcaatgtctcctgtaccaaagtcataatcgtggtctaattctagcataattttggcagattcttctactttatctgttacttttccttttctattaaatatatctaagatttctttattttgttctaacttaatcataatatcctcctaatagtacatctatcaatcgacctgttaaactatattgtctaactgattgagcgtaaccatctgataacccatggtctttaatactatttaaaatctcttctctatccgcctctaatagcacttgtgcagtactgataagtgtcttagcctgtgctgactcacagtcttccctaaactctctaatgatatttgcaataataggagagaacgtaagaccttcacgaatagattccccgtccgctagcacaactagtaagtccataaaataacgaataaggatagcacattttaccgctacttccatatcgtcattctcaatagccttatccatacgtgcttttgtggctttaatacgaccattaattcctctaaacaatttctctggtgctaaataagtaaatgtttctcttctgtattctagctctttcatatacgtaactaaacgagtacgcttattgtcaataccttcaatagactctccgaagaaactttgggagcttgtggcatttagcatttgtaaagcctctaaatctccattttcaatacggtaaacatattccacgatagacatatattttacctctaccttatttccatcaatctctgtttcctgtttatagattgttgtaggatgcattaaatcataaggagccggcatgtatacaaccatatagtcataatcactatcttctgtatagtaacctgcgtatcgactacctagctcgtacacagctaatacatcacgcatttgccctaaatatcgtttctctcctaaagtacctaaccaactaagcgctcctacatatacctttgttttgtagtccatgttaaatctctccctctataccatttatttttttatccaactgtagttatcttagcatatacaaaaaaggaagtcaacatatattgtcaacttcctttaaaattttatccaattaataatgtaactttttcgtctagcaagtagatagtcaccttatattctcccggtctagctgacttaatggttacattgcggatgtcttcctccttaaaagcaattgctcctgtatcacaagaaatgtgcacccaaggaacagactcaatcatcacaaattgcatcaccatatcgtcaaacatagggaacagggttgttcctgtgctaccccctaaaacagacactgcaccgactacttgttctagtacagaaccgtttgcgataaactgtaatactttaattccctctactcttgctagtgcttcggtgtaagtatgcacacctagcaatgtttccccatcatacaattttttacggaataccagtgctaacgtacttgttacaccgctagaagactcatcctctaatacatattgcatatgtttacgccctctaattgatacttctgtataaaaaacttttggagaggacatatataggttaaatggaatctcttgtaggttagagaaagcagagtctgctaggctaacatctactgcaaaatcactattgattaaaggtttctcaatagtatcatctaggaactctccataacctccataagctgtgcttgcttcttttagtaaacttaatgcattaatctgtctttctcctactggtctgaatgaaatagttcctgcaactgtttctttcttaaggtctacctcaacatcttcaaaagttgttgtaataggaatatctgtagtcattattgagcttgtgtagcgtgcccctagtaatactgattccttatctgtgataatattataaaattttcttagtgttacttctttcccttttttaagcatagcttacctccatctaatagtaaattattttacaatttctacgtctacatactctccatagttccacccagaaccacttccgtagtccccttcaatagctatccgtgcatcattggtaaaaatacctatcctaactgttgaaccaccgtaacattcttcactattatcttcaacttttgtaataatgttatctgtgaaatcaaaaccatctggaagaataacttcaaaatcgttataaccacaacagtctggctctgggttacaagatacttttaagcatgacccatcatttagtacaaggcttgcctcacatccatcctccgcatattctagggctataacacttttaccaattagctcatcataaatactcatagtagtcctccatctatctagttgttttagacttattgctcttccgtctatctgctttacgtttctgagatttggttgcgttagtataccctacactacgtacattaccgcctctaagcttcctctgtacgtagttcttctctaggtatataaatgttaaccctacctctctaaaacgtctctgagctcgtatagacagcttacctacaggttccttaccaatgctaacataataaactgtgtctaaagatgctagggtttgctcctctttcttcttacgtagcttaatcatatctgcaggtacaccagtgtaactagacactaagtcttttccatactctaattttaacataatatctttttctgtcaagttctgatattctttaacaaatcctacttggtagtagccttttgtggacagccgttttgtgttactaccacttgttctgcccccagtacctacatagttcttaccaactacagtattccaagaaccatattttgcacctttaaaccccatctaggtcacccctattctcttttgctttaaaatgtcttaacttaattgctttctctgggtgattcctattatggataaacacatcacagaacactctcgtagcctcttcggtaccgcctactctatttattaaattattaatgagttcaggtttagtcattcttctagcagtcgtagatttaacataaagcccagataccccaccagaacggctgtttgttttcataaccttagctccattagcttctagcctatcaccataccgtctgaatgtaccaagcattcttattaaatcttctttccacaagatatttaacatatgataagctgatttttttaggggaacggctaggttgtttatactcacctaacattgcctctcccatgaactctgtgtaagctagaatacctacgtgcttatgattatgtctagtaagtatttgttctactttaggtacatggttgtcgtggcataatacatatacatagtcacacaccttttcataatcagatagttgtttattcaacctttttgtcgagtcacgctcagtttttatctctatgccaatgagtcctcgtttttctgtgaagactaggcaatcgcatattgtattaccttgcatgattgctttctcaaaaacgatagcactctttcctatgtctccgaatattctttgcttatttaaaattaattcttgaatatctgcctcataaaattgtttatctgtcattatagtgtctcacttctaaattgcggtctttgaccatctaggttaaaccatatctgtttctgtgacaaataaccctttgttatagactccacgtctacatatgccttgtcccacttaatcgagctcaaaccgataaaaacccctgtattatctccataggctatgcccggttttccatcaggtagtagaatatgtctgtcctcttcacgttcgtagaaacccttaccttcgattcctgtgaatgtatcaattccattaactactggtgctaggaataacggtggttttgtttcaactcttcgttgttcctttatcgaccgtcctttaatcttttgcgctagttcacccagatatgttgtgcttttgaacctaggggtcacttttttcttcaatgtagtctttttggatagaatctccaatctcttttactttatagacagatactacatcagtacccgttagctcctcagctagttcaacaatatagacaggggtttccttcacttcattattaacctttgttttaatagataagaccccacgtctgattaatgttggtgggttgtttacatctattaatgatgtctccccattagggcttattacttctgtaaaattcatacttagtcacctcattattcaatatagcaaaaaagagactagttagtctctcttttaccttttcgttcttctaactgcttaatatattgtttttgaacataacgaacaattgcagttctaataacaacttcgataattcttgctataaaaggaactacaaataccattagtgtgaacaaagcaatacctgttacgttaagttgcaagctagttggtatgatgaagataagagaaattgctatagctattcttaaaaggtagttaatacctaaaaatacataagagctacgtggcaaaggagcctctccttcttcaatcatgtatctttctttacgcttagtattagtaaaggcagttataccttcacctacatatgcaatagccaataaaatataaactaaattaccttccatacaggtacctcctataagaatactggcatgaattgtggtgtatcacgctcagggtctaataccataattagctgtgcagggcttgttgttggcaagttattctctgctgagtagttatttgcccccataggagagccaacatacacatggaatcttgaaaagtcttcttgaataatacgtgttgtatgaatgtgtcccatgattaggtagtcaataacttcatctttgatatgtttagggattttaacatctacttttttgccctcagtgtcaccatgcgttactttaatacgtttccctgcaactgtatctttaaaactataaacatcacttctgttgtctacaagtttaatatctttgtttaacgcccctaattcttgtaagaaatgaagttggtctactacaagataagccacattatcattatgaattttatcatttttgttaccttggaaacggtcgtggttaccaccaaccataccgaaagacacttcaaattctgccttagctagtaaattaagtgtatcagcaagaactctaattcctttagcaatctgttccgtagcaggaaactccgcttcaaatgcttggttaacattacgcatattaatgtgttcaataatatccccaatatggtaaacatgaattttcttaatatcctgttccatagccacttggaatacttcttctaataacttttcaagtcgttctttaaagatttcaaagttgtatccacctgtgtcaatgttattaacaaaagcaccaatatgccagtcggataggcacagaataagttctcggtctgaggatactttcggtgcctttaaatttttattgatatattttaaactagacatgtcttttagttcagctaataagtatgttttcaaaccactaattaaatggtcaagataagctccctcacgttgtaacttaccgaactctcggttacgggctagcactgcttgattctctactacgtaagaagacagtacatcaaacgatgatttatcatcttgtaacaatactttacgaacagcctctagcgtaattttgcctgccatgctagcttcgtaaagttcgtgtaactctttatcttcttcaatttccttaactagtgcctttaagctatacaggttctccttatctaagtcaaactcctgtgctagtttattaaatttaccaacgtgtactcgattaaagctccgttgtaaactacctataataattgtttgtaaaattcttggttcatctaatttgtctaataacttctctaaaggttcgttgtttttcaaaaatttacactcctatcaaaatttatctatctttattataccacaaagttaaactataagatttcagaaagcacacttaacagtgtgttatttacagcttcactaggtttacctaagaagacggttgccgttgtatctttccctttaccattatgaactttatagacaacctctccggcattcacaccatagctccttacactaaacatgtcgtcaccttttgtgtgtctaccaataaagacaataactttttgatagttatgtgacttataaaaattaattaatttatgggctacttcgttaacatgctgttctgcataaccaaaacaaaccactgttccattaatgacgtttgcagacatcttccctattgttcttagcacatagtcctgcatatttatgttcaaggcatctacaagtacttcttgttctttcaagatagtgcctagctctttacaaggttctgctaccttataaagattttctccaagcaaatctacaagaagaacccaagagatagttctgtctgttacttcataacgattgtagttgtctgtctcttctataatatctttagaaaagtctagcatagttttagcaagcgctattaccttatcctcgtcctcttttgtacctgtgttagtgaacttaactaagtcgattatcaactctgaaaagtgtccaacagggcttacaacttcatctacaaatgaacgaaaactaccctcattacgataggtgtctccaaatgttgctaaatggtacaccttgctaaatgggttatccatagatgataatgctgtatctaatgcacctcgttggctttcaaagaaaggaaaccctgctataataacagcatcatattctcctatatggttgtgaatatcaggtagattgaatttattaagaaattctacatctacaatgtccttatagaacctgcgtaacagcgtgttcatgacatagccttgggtgttcttttttgtaataagttttatctttgtcatttaattataccccaccatctctttttaaaaaaacgtatgtctgtacgttcagtgtctctacgtccatttaagggtcttaaaaggtctttgaataatatgtcttggtcgcatttacttaggagctctttatagtattcttcaataggtttatccgcctctacaaacccactaatgatttctttgccatctgggtcaagtacgctaacatagaaaaatccattctcttcatctaataaaatatcgtaccctttataagtatttcgtattccttgtttaatacatttttccttattgtcgttcatgtggttacctccttatacagtataagtatagtatataactaaactacaacattgtcaacactatatacaaaaaaaagagaccttaacgggtctcttataatgaaactattctgttttgtccccatacacaaatggttcatctgctaagaacacattgtaaacacctaacttaaatctgtcatcagcaaatgctaagaacgcttgtaaaacttgtttttcttttacatctttagttttaagtttctctgtagcaactacagggtaattatatgggtcttctaatgtacgagtaatgaagaatatttcattatcatcagttataataatcggttcatcagaaggtttaaatgtattatccttttggttataaattaattcgttaactgtatagtctgttccttttttttgtaacagcatatgcatatccacctgctactgtacctgtaaacccatccgacaatgttggtacaataaggtatttaccatctattgctacttctagtgtctctggttttaacaggtcttcaatatttaatatttctttagccattttctttcctcttttctatgttattcagttggttctactggttctgggtctgatacggtaacatgtaccttacctacatggctaccttcctcagttgttgctataatgtctgcttcacctaatgctaaagctacaacgtcaccacttgcgttaacactagctatggtgtcattactagaagaccaagtaaatttaggattcgttgcagtatcaggtacaatactagcagtaaatttgtacgtcttgcctttttctaaagcagattctccactaacattaattcctgtaacttttatgtattcttctatctgaattgtacacttgtcagtgtggtctccgtcctcagtagttacggtaacaattgcagtacctgccttatctttacttgtgacagttgctttattgtcagagactgttaaccctaatagttctggtttatctactgagaaactaacttttttgtttgtagcaccctctggtagaatcgtagcagttagttctaatgtccgttctgtgtacattttagcggtctgtttgtttaatgatacactactaactagaacaatatcagggttattttctaatgataggttacctgttagaaagatattgtagctaccaaatgagaataggtcatttacaaaaagtttaaacgcttgaagggtacgcttatctttgtccataccttcctctactgtgagctcatctactactgcatgattatatgggtctatagttgttttacaaacatagtatactttatttttattagtgtatacaactaattcatctgacctaataaatttgttaagcttatcattccaaaatacagggtaaatataagtttcctcagatttttggtctatctcgtagttatagtgaccagatacggttccagtgtacccatccgaaatagtctctaccacaaggaattttccaaatagattaggcaattctaatttgcttatctcgtctatcttcatgtcgaagctcctttgtattaactaaggaggggttacacccctcgtacttagtctctgtttttgaagtcttgtctagttccgactacttcttttcctgcttcttcttttgctttaccataagaagtcacagcgttgtttttgtaccagttgtagatagcaagacctacagatagtactaacattaaaccttggttcatttgttcgtctgtgaatggtaaaggttcccaaccaaatattgtagtcaaaccagttgccacaaatgagattcccatcacaattaaacgaataaatggtgcatacttgccagtgttgttttgttccactaaaaaatacctcctttatgtttctactgctaatatagcagacataaaggaggtattactctaatctgttaaatttattaagacaaactcacgaacattttttatagcatcttttacggctttcttagacacccctgtagttttctgacaattcagtaataatacgagcatcccttactgttccttgaattaactgctgaaatactgctaattcaatttctgaaaaattggcttttgataataacgattcaataagttctgcatcctcaatatctgcctgagagctatcgtcaatccctaacaataactctacttcgttatcttgggtgcctagacgttctctagcggtatctcggaaccgtccttttacatagctgtgccttactcgtaaattcagagcttttttaatatatcccggaaagtctacctctccatttatatcatactcttttgttaactttataaattgctcatcaatatagctcttgagctccttacgtgaagcctcactattgaacgaatctttatgagtgttatagactttatatctaaggttactatacttatgatacaatcggtctacatctctaggaaacactccttttccatgagtctctgtaataaaccgattaccattacgtatttctttttcctctttttgaacatctctactcaaaagggttgtccccctcgaacactaccttaacttgtctcttaaccttctgagcatcgtgcccgtaggctccatatacatcgcagaagtggatagtgtgtggtatttttaactccataccataaaataagactcgttgataacctaaacaccaacgattacctacatattctatctctataacaacagagttcgcactacttaagtcagagttctctattaggactctcttaccttctctcattgcctttaagaacatatctcttattggttgtagtgaactaggtgtaccactgttgttcatagtcatagtacgtttagaggagtcttgatgtttttctaatatttcaaaaaatgggttaggtgctagtcctttgcgcaaaataagttcctctcctttatagctaataaaggggctaattgcccccttatctgttagtctacctgtttaagtaaatctgaaacatctgttcctgtttcggggacttcttctttagtagcttggttaggttgttccttatgattttccatatattctttagtaaattcatataatggaattttgcatacgtccacgtcctcattattaaatggggcataacgatgtgggaatgagcgtaccatcattttagcaaatagttcgtctcgaacaggtcttccctcttctgaacgtaaataagccacccaagctttgtctgaattgaatttaatctcttgtcctgcatccgttgtataagacttccatgtgcctccactaatcaaagcatactgcttattagttgcaaaacatgaacgataaatgttttcctctaagttcagacctgtatctgacattaaatacatttccgctttttgattaggacgagacacttttgattttgccgttttaacacgtagaatatgccctacataagtctcttcctccgcaccgaatgcattcagctctttattcttaatctgacttgctttaactacttctaatcgtaagctagcccagtgatgtaaggcgtgtcctccgggggaatctactccaccaaacatactacctagctcatcacgtgcttggttaatagcaataaataatgcttttgagtttgtcattaaaggtgcaatgatttgagcaaactgtgccattgcttttgccttaattccgggctgttggttacctacacctttttctaactctttctcagaagctgtttgcgctaccgagtcccaaataattaatacaggttttccaagcttactgaatactggtagaagtcgttgtaactcttctgctacacgttctaccgtgattgtatccttactaccgtctttgttctgtttaggttctaccatgaataccccgcctgcactaaagtctactcctaattctgctaagcgttctgggtctgcggtaccctcaacgtcaatccatacagttggtacatctagcatctgtgctacctttgtcagatgaactgctaaagtggacttaccactagagttcttaccaaagacctcgaccatacgtccaaatggcaatcctccacctaaaatgtaatcaagttgtggaatcattgttggtagtctgtctgatacattagagaactttgtgtccgtaaatgtagttagccctacctcttttgtcaaatcgatagttccaaaatctatttcttcactttttctttttcttgccaatattattcactcctactaaatattttggatagttaacacagaattaaaaggggcagtatgcccctcctaactgtttcattattgttaaacgttgcctaccatacctgctaataggtcgtctacactaggtgtgttatttggctgttggttaacaactggttggctgactggctctggtgtattagtcacaggttgctcaggtacagcattttgttgtggtgatacatcaggcatggactgcatattgaaaggcatatccgcatcagaaatggtggaagggtctgtcactggttgttcattgaaagaacccatcggttgttgctgttgtacaggttgttgtacaggttgttggttaaaccctccattaatgtttggaggtgtccccatgttcgttgcgttaaaacctgtagcaggttgttgtggttggctttgctgtggcgaccaaccagtattttgttgcattggttgtacaggttgttggttaaattgtggttgtacaggctgttgattaaattgaggctgtactggttgctgattaaattgtggagcttgggttccttgactttgagctccttgatgcacaggttctttcccgtctactacatcaataaagtactcaataaactcacgattatactctacagaaggtgtagcttggtatttcaagtcttctaataagttttcccaaccttgtggtaatgcacctaagctacgattactaatcacttgtacattgtacgaagtaggtttgttactacgtggtggttttgtaattgaaatagggaacgcatctgcagaagagatgaagctgtattgtgctacttcttctggtacatcaggtgaaaactgtggacgtaacattgggttacttaagctctcattaatagccatgcaagctgtttgtggtaacttaagtaaacgaaccattagctgaccattagaatctgtttcgtagctaacttctcctgtttgttggttaataattaactgcactacgttaacgtagtaacgttgacgaggttttgtattacggctataagggtttggtacacgattttctgcgttccaacgaatcatagcttgttctaagatgtcttctgcattagggtgttctgaaaagataaagttgctctttaaatctttaccattacgattacgagttgttaagaatgcctcacgagcgctaacattatagttttctcccggtactgcaggaggtaacacacgtacatatagagttgatggttgaccattttctgctttagggaagtataattctttatgttttaaatgatttgatgggtagtctaccgcttcacgttctccaatattttgttgttttaattgttgttgtaattgttcttgaaaattcatttaaatttctccatttctatttttttatattatattatttttttttatcactaattttactgttctaaattccattgaaagtctgagaaaccattatttaccttatttttcattgggtctggcatactaaccttttggctatactcatattccctacgaaggtctgctccatactgaataagcatatcttttctttgttcaaaagctttaactatatattgcagttgtctcacgttaaatgataggttaactatactctgtctaagtttgtaatagtcttcatctaacataatctgtgcctcaatctggtcttttgtaggtttagctactccttgattgattaaggcaaccctgagaaggctcatatagttctgctttcttcttctctgcttttaactcatagttttcttgatacatgcgcaagcgctctagtatcgaagtccaataagtatacttagcaggttgctctaaaaatgctgttctcacattaaattcattgacttgtaactctgtttgtaaatcatgtgtcacaacttctccgttatcatcaataattttaattgttttgaactctaaatcatctactcgtaaattaagcacactctctaactcccccttcttgtattaatacagaaaacttgtctgccatattataataacatactatacgtcaatagtcaagctatttttaacatttttttattaaattgtcatttgtttatatgactctattgcatcttggataactttgataccttggtctttttgctcttctgagataagtttgttatcatagtaatctttaatcttagcttggtctttgaagtattttacgtatcctcggtaagaagcaaactcgttgataatttctgcatcataatcaaccatatcattgtaattctccccaatctctacatctgccacaatagggtaacgcatctctttaccttcccactcaatcattaagaaatcaattggcaagttctccataatatatttagccacttttgccatctcgtccacttcatcacgtgggcaatcaataacaagtgagtcatgtacagtgataacaatacgtgaacgcttattgtgttttctgatatactcgtcaatgtataccattgataggttagttaagtaggcaccagttccttgaatgattgtatttactgatttacgcattgcgccattaaatactttcttatctttagagaatgagtcacgcaatagtctacgatgtccttgtagtgtttctacgtagccataacgttgagcaaattgatgtgtctcttcaataaattgtttaatacttggcttacttgcaaaatactcttcaaaaatacgctctgcttcttctacagttacacctaacttaggcgcaattgaaaaaggactttccagttataccctcggtttcccgatatttattaggggcttagactatatcacgctcctagtcgttactctaggagccttaccatttccacctgttggtgtactctactcagttatattgtaggtgtcctctcgacagctactcacttttcgatagtcgttcggcatttatgctatagtgtgttttctttactggtttgaggagttcacacataaccctataaaggttcagatatgcagtgcttaccagtacaccacatacgtcattaccctgtaagtattctagctacctacactcttcttttactatagcaacttagcacgggattgcctctatccttttcaggacttaggttctcttatcagcttattggttattcagctatgcccgtttaggtaagtttaatcgagtagcttacgctacaagacggcaattgtgtttaccgtatgcaataccgaagttgacactctttgcacgttgtcgcatatcttttggtacattatctttaggtaacttccatacaagcgatgcagttgcctcatgcatatcttcaccattaataaacgcttgtgtcattgctttatcttttgcaatcaaacctaaaatacgcatttctagggcggagtagtctagttgtagcattccacctccctcaaatcttgttctaaataaacgtttaattgggtatttatagtcaaaacgtctagggtctccaaccttactacttaattgttgcatatttgggttgtttgcactcaatcgtgtagattctgtaccggtactgttatatgaaccatgaatcataccatctttgttagatgctaatttaggtaacttttgagcaaagttatttttttagtgtgtttactttagaatactctagcaaaagttcagcaacatgtttagcctctggataatttttctgcaatataagctagtgcatgtttatctgttttataatctctccatgttagctgatgttctggtaccccattgtcaaaagtttcttttttaatagattctttatcataaggtagtgtaagtcccattactttaaatagcagtctacctttatgttcagacgaacttggtttaaaatgtactttgttctcactatcagtaattttatatttatctcgtagtctggcaacagaggcatctctatctttgacaggctttgtcatttctttaagcccctctttgtagaacatcatatgttcatcttctacttcttttacttctggtagctttctaatttcattaagcaaccgatgttcttcttctgtatagatattctctactaattctgcgtattcagagtctagtagaacaccagaagcctcgatgtgtgctaatgttgctgttaatctaggataaaagcctagccataattccaacatcttaggatgttcctcaattcgtttatatagaacattatagatacgtagacagcaatcgacatctccactagcatatgggtgcataatttctaatggaatccagtcgtagttaaagttaccaccatcaatctcattaataagtttaatatccgatttcttaggtactacaacttttttcttttactggtttaataatggacttagtaggtttaccaataagcttagcttctttaacttcttgcttatatctatccattgctatcttgaactcacactctactcgttctttttcagcttctttgaaagcatcaatctctgctttcttacgagcaatatagtcctctttatattgttttttatactgctctaacggttcatcatagcctcccatatctgttaattcatatgcaatatcggatagccgttttgaagtatctactttctgagaaacaattagatagtaagcaatttttgtatctctgttgtcttcaaactctttaaatccttttgtgctcattaagaatctaatatcgaactgaatattttgtcctactttttggttgctgtctgtccgctaaaaacttctcaaataagtcatatatttcgttaagttcttctgggctccatttagcttcatggtgctctaacggtatagtcacaccttgcccctctagccaactcatagacattacaagaggcttagctcctaataagtcaccacgtaaactatttgtctccaagtcccatgcagttactggcttcgttttgtctaaaaaaccgaaaatttgtcttacacgttcaatgttatcaacaaattcgtaatctacttttttaggtataaatgcttgttccccttcttgaacaaacttacccaatgtatcaatatccgccatgataaagttctcaatgtttgggttagctgtccagtattccatactaaacataggtagtacccaagtttcaaaagagtctactacttcgtctacctcaagtccctgctcatcagccgttctcagtatgttctcattcgtaattgttttcttagttggtactcctctattctttgtgatagaagtactccctaataaatttttacaacccatctcccccattgggatgataatatctggtttgtatttcattaaacgtctgagtaaccgttcctctggttctttacgctgtcttaacgtaggtgtcttatacttaattggtttacctgttctagggttaactttctgtacttccggaatcatgtcgtacacatagtctacagcatagtccctacctgtcagccctattgtatttaacagacctgtgagttttttacccatttctgttcttttaaaatcaactgtttgtccgttctttccattatggacatgattttctctaatgtactcttgtaagaatagaattttcaattacacttttctcctctctgttgctctatgacactagtatactttgtattatgttatttgtcaatatagaaagagcaaaaaagagagctttatttgctctctttattataagtgtctattgactctttcaacttggataatggtacaaatttaactacatatttttcaggttgtataaaacttttagagtttataccatcccatgctaccttctctggcttttttttaatgtttagtttccataatttgtgattctttacagagataccttgtgatactgcttgagctactacttcatcttctacttctaaaatcttcaatatatctttcattcgataaccagtatggtgagagattgttcgagctatgtctgttcggttaatcgttttatctttactcatcctgattaccctttctctttaatgcacgctctctgttagcattacgtttaatttttttctttctgaatatatctgtctattttattgtagtcctcatcactatcgcacactaaccaaatgttcatagcccaaatagataaagaagtctgtacatacttaaagaatttatatttgtactctgatttaacctcatagtgattacctactttatggtagtattcttcatgtctggtatcgaactcttcttctgtaagacaaggaaacgatatttgaatcttgtctacatttgtttttaaagggtgtagtgcaaataacacatcatacgggctaacatcaggtagcactactggacaatcaatcgttacagggcaggcagtgaaagctagttgaacattttcaatctctctgttctcatagctattttttgtaggatagattacttcacttgttaaattcttagatatttgctcaattatgtagtatggtacgattgtatctgtgtaataggacacagagcccgcatgtttaaataatttctgaataagtctgtcgttcgtatacttttcttgataaagtatataagatttttcatttgttctatccatgtaacctataggggtcttcaatgggttgtttgctagttcatccatctccctctctatctcttcttcattcaatcggttaactttaattttttttgctatatcttctttttttcattaaattaatattaaagtaccggtcagtgttataaatattaagtcttttcactctgggtgcttttgtcattataaaatgctccttctactttttaatttccctatctctattataccataaatataaaagatagcttttcgtagaaagagcattatattgtactaagttgtaataaattttaaatagttttctgtattttcaagaacagttttcacatcacctgacctactgtttaattccattaaggctgaaataatatagttttgctgttctttattgtaactctgtgctgtttgaaataaaaatttctcaataataggttcttctggaatttctattagctgagcatctctgatatggctattcttaaataggaaattctctaaaaatttcttacatttacctgtatagctacttggtgactgtgttaaaaccagttgtgctcgtttcaagtaccaagaacttttgttaaggtcttcttgtagcttccccttgaaaggtgctcgacaaatatacttaataacatttcctaaatggtatctaatttccgcagggtacttagcagtaatatattctataacctctattacctctatttctccttgcgtataatgactagggctattaacgttgtctatcatctactctagtcctcccgtagttttttagaagcttgtttaaattctttttaagtcttttaaggagttcagcatgctcattgctatcttgaggtagtttcttccctatagctacaacatgtgcagtttctaagctgaatactcgtaaatcaatgtcgtatgtcaatgtatcaataacgtagtcttcccgctcacctgtccagttagctgagaaactaacagatatacttgaggtttctttcattacactatctgattcgagatacgactgtactgttgctagagcttcctgatatgttttagccatactattctcctcctaaataagaattaactagtgcatctagtgaatcctctgcatccatttgtttagcatcatccattatggttgtttcataaactagactatcttcccagttatagtcactaggaaaataaaataaaaagtagtctttgtctttgctaccataaggcttaaagctagttattgcatctaaaactgtagtaaatgtcttgtaacaatgagtatccttgtagtcgtctacatatgttatgttagagaccatcaaagggtaacctcttttttcaatctcattaacaagtttttcattatatgccatagtaacaaaattctttgctctgtttctagtaaatataagtagtgggatatttttcgtttcttttgcatcccccacaacttgcgcccaccagttcttaatttctttgttatttaagaacaagttttcaatcgtccagtcttcacgatttttacattctataacaaatgggaagttagcatcgctagggactacaatgtccccggcaacgttattactagaagcccagtgaagcccccccagaagcaggtactcggttaaactcatatccccaccactctgtgagttctttagccatttgacgttcaaaacgtccgcctttgttacgacttttcttgcctactgcgctgtagtctgtcattcagctaacctctttcatattatttttctttattttctttaatagactctaactctttttggattttttcttgaatagcattcaactctttttcatactctgccttagcctctaagcggttttcttccgttacacctagttttgttaataaattgtcaaatacagcctgctgttcaattaaagaagaaatataaccatcattccgtttgcccataaattcgacaatagtagttacatcagataatgatactgaacgtttacttaagcgttctaactgtttttggtggtttttatcatgaacctgccctgtggctaaccactcagcccacactctcatgtctgcttccgataactccccgatacgtttgttgcgtttactctctttactcatatgtttcgtcctccattaaactttcaatatttttgaactctttaagaatctctttttcaagctcttctgtaattgtaccactgtcttttaattttttcaatacaatttttaaattaatatcttgcataaggttataattttctaccataaatgcagtgttgcgtgctactgtacttaacgctccttctagctcttgatatgtcacatacttttgaccatgttctttctctagtaaaacatactcatctgttttttcttcaatcactaaattctgcatctgattaaaataatcaacgaaattcattttcatacctccgtagtaggctgttaccatcctctattttgcgaacttctaaattttcaaatgtctttgcccatatttctcgtgagcacttatcaaaaaagtcatgaacagtaatgtactcttcacatacacgagaaactacacctatttgatttgttactgagagtgtgtcttttactctttttgcatcgaaccctctaatagtctttttgtagcctactatgtcccctactctaatttgctctttatcaactaggtgtttaactgttactacttcttctttcttggtgtacatgctagtcctccttattctttaatgtgaacttatatttattatctgtcatccctacataagttaagctatagtttgggtaagtcattttaataagctccactattttatcgtaagaggtacctaaataaggctctcttaaatcaaaagttacactgcactggtgtttttctaacataacagaaaagctacccataacgtacaataatggtggcttaaattctgggatgagcatagctataccaccccagatgaaccatatgcgccttctcctcgttcagttgtgcctaacgctgatacttcaacaaactgtgtgtcgtatcgtggtagtaagaaagcttgacataaacgagtgccttttgggataaatagtgttcccgcaaccacatactcatcagcattagatattctaacttctcctccatagactagctgtaactcctcacttagcttctctagctgtttttcataaagagcactaaagcttggatacattgaccgagctactgtcactgggatgttaataagtttaccttcttcattgattgttaaaacgttcttagaaacagctcttgcatctaattgtaaagagaatgtattcttaagtggcaaaccaacctctccacgatattccccttccactacaccttgtgtgtttcctaaagtgattggatatttcatcataccacctcgagggttaatgaataaaccatattgtttggggtcaaacgatgtttttattccagtagaaataacatttgaacctaatctcccgggaataactactccatcgtctgctgtgaataagtcatgtgctacatcattttctcttcctcgttttggtttcttagcgccttcacggattgtatattttactacagcaccttctggtacaaatagatagaatccagtgtggtttccgtagtcccaacgaacaatcccatcctcagtaccttcaataattctaagagtactacacttaaagtcatttgctttccaccagtcacgaactgactgctctgcttctttcatcgagttaaatgttccatgataggtacgctttgtctcatcctcatccataatatttctgctatttagaaagtatactgatactcttcccatccttgttagcctcctatagttattcttattcaaattctcttaatacgtcaatcgcttttaatgcttcacttagcttactgatttctatagatatttcgttttcttctatcttaatttgttgttgcttgtagaataaacgaagtttcttttcttttagttccttaattcttgcttctactttcttttctaactctgttttatgtggtctttctagtaattcaaaagacccgcttgcactaccatttaatcgagctactatttctttagcacagtattggttaccgtctcctgacttggtaaataaaattcctttttcacccttatagatttcataggtttgtcctgtagcccaccatggaaagctcatagcatctttgcagtgaagtaacatcccttcttcaaggtcttcttctgtgtaatctgtatccttcatcaccttagaaacaacctcaaattctgcgttccctgtattaccatttaaacgtactaagatgtcctcatctaggctctcaattccataatcatcaaaaatacatagtgaacctgactctttttagttacttcatagattttattcgtagtccaaaaactgtagtttttactgtccgtgcaacgtaatttcatacctgcatgtaaatcttctagtgtatatctcatttttttccctctcctatctataacattaattttattaaccctactccatctgcttttacagagtagttatttataatattccaagcctcttctctccctagactatttgcatcttgagttgttgggcttataactacataagtctcgttatgtctcttatatagtttctctgctaacttcttaatttcttttttagcatctttatctaaatagataaatattttttgctcttcattcacactatctaaaataagttcaacttgctcgtcagtcacctgcttaccaaaagtacctaccccagactcaccaactgttaatgcatcaggaacaccttctgttataactatctggggggtttgactagctctattaatattaaatatagtatccttttttgaatgctcaccctctttacttggagcgttcaaagacttaataaaactttgcccaatagctctagtattccaatattgatacttgccatcttttccatgagttaaaaaaactaagtggtctttaagtctgactgacttaccattttctaatggtacccaagaatcctttacatacccaatattgtgtatgtaaatatcattcaatgtaaatcccctcttattacagtataataagaaagggtatgcttctggctctctcaggttctggcttagtagtttaaaaccatctggcaatggggggtgcgactaactcttttttagcttgtttagtttcttcttttggcttacctaacgaacctagaagaagtaataagtattcctcatcagttaacttatctgatttaggcacataatttttattattaaacctatagccatattcttctaatatctctagcgcttctttaaaagacacgttgtaatacttcattacaaaagatactgggttacctgaactaccgcacttaaaacaatgccataagttattctttgggtgtccttcttctaccctaacataaaacttatacttagtatcgtagtcgcaaaaaggacaattgtacctgtagtcccttactgcatatttaggtgaacctaattcgttagataacaagtctgtaaacatttaagccactactttcctcataatatttaacattgtatacacattaccaaatttttcataaacactatttaaagagtctagtgacctgcttaacacataagtagcctttttcctctctgtctaaccgcatatactcagatatgtccttatacgcttgtttaagttcatctgagtctggcttgctcaattgtagagtatctactttatttatgagctcttcctctactttaactttttggtttgtataaagtaaatcaagaatatccagtactttagaaatactatcatctacttcttttaatgtataatcgtcttttaaaggtgtaacaatgtcatattgttcagcaaagttaaacaactctgcattctcatttgccacttcttcattataccattcattctcattaaagcaagctatttttgaaataactctctttttattatccccaacaccgtatctagctactaatgttttgtctgagtctaacaatctcaaatatagtttttttcgagaagtactatactgatactcatatcttgggcaacaagggtaccaatcgaatagtgtctctaatgggaagctaaatagtttcccttcattactactacttgtaggtacaaatatagtaccttcgtttaattctctacttaatgtataaatcttcatgtaatcacctatttactttcttcaaggtaagaacgaccttgaacttttttcatagtgattacgttctcaaacaatggcttcaagttctccgagtgagttattacgaaaatactactaatgttcttttggcgttctttcaatattttaataacgttctcacaaccaattgcatctaaaccatcaaaacactcatcgtacaaacctaaattaacagcaatgtttgcttttgactgaactaaatcttgaatagcaaaagatattgctaaatcaattctcttcttctctccctcggagtttgcttgatatgtgtttccaccagagccattcactacctctaagtcaaacttatcagctaaactaccatctgctttctctgtttgggtactaaagtttatttcaatatctgaacctgaaagggtagataagtaatggtttgctctttcatttaagaaaggtgtaactaggtcaagtacctcagagcgtatgcctttattagagaaaatttcttgtgcaatagttttatattgactagcttcttcttcggcatctaactttaattgattaatgttatttagttcatcttctatttctcggtctttgtcatagtcatactgaggtttaggtatttcttgtagtcttgctaacatatccttaatgctgtccctattattaatagatgtgttcaatgtgttctctaatgtatctatctcatgatacaacgcattcatttcaccattaagtttatgataaatattagtatgttcttgaatagcttttcttgcttcctcttgtttagctcttgcttgctctaacagaggggaatacactgctaatgcactattaagcttttcgataaacacttctttatccgctatttctctttgaatgcgttgaatttcttgttctctatgctgtgggctcaataaagcaccgcataggtagcaatttgtatttgttttaacatcttctagttcttttttaatttctcaatagcagtatcattctgtgtttttgcactagacaatctactaacgttagaatactgtgtttcaacttctacatcaatttcacgaacgtctgcaggggaagttaattgtgccatctgctctcttagcttttctaattcgggttcacgtagtgctcttccctctgataaattcttctcactttgtttaatagctaattctgcattagctaactcactctctttttgttgaatcagcttttctgtattctcgtattgttgtaaagcactattgtaagattgagttaacccatctttttcatatgttttagcaatgtactgtctgttcagctcttctgcaagagctagtgcttttgtgctctttctttagcaacatcctgtgcatatcggtaaacaccaatatcggctaaattctctaagatttgttttttacccttatcagttgctgtagcaaatatttctacgttaccctgaccatacatgatactattagcataagtcaggtaatcaataccgaacacatcttgaatctttttgtcagtgtctgctacagatttctgagttatatcatttgttccttggaaaaatctagtagtatttttatgtttagagtgtttacgataacgttcgatacgatatggtaccccatctttttcaaattctaaaatcactgacatgtttttctttgcttgtttattaattacagcatcagctttcaaaccactaggggtagctccatacaatgcataagtaacggtagacagtaaagtacttttacctgagccattactctgaaatgtttcgtttgtatcatttataccttcgataagtacgagtccttggttgtctaaatcaatagatacagagccaatggacatatagttctctgcgctaactcgtttaaactttaacatcttttcctcccaaaatattaattaattatttcaataaacatattatacttcaaaatactaataaagtcaatagtacaacgcaaaaaagcctagatatatctaggctgaacaattattacacttccattgcctttctcaaacagtcgagggctttgtctttaattattttttgcgttagggtacttttttactaataaatgcattgacaacttcgctaggtgtcgaacctgctgttatgtttatacgtggctcaacatggtagtccttctggacttttattctaatattacttaagttgttctcttcttttattctctttacagcctcaacctcgtccacattaccaataaactggatataagatttctccatagaacctgttgttgatgggctatcagctgttactgtttcaaacggagtatagtcagttttaataaatttttgttcccacttcttaccctctatagtaatatcataaaaacctttttcttgaccttcgtccgcaaaagaagtctgtaaggtattacccacataaaacacattagacaggtttcccaaaaattgtcgtttatgatagtgacctaatgtaactatgtcaaacttgtcagggtataaatcagctactttaaaagcaccaccaagtgtatgggagtacttcccagtagatgaaccatctacaccaatgtgtgcacttagaatattaactgtttcatggtctaaattatcagcttgttcttttatccaagctttcatctcttcgacctcttccccatagctaacagcgtacaacgtataatcatctttaacaatcttgtttaacgtagaacaaactgtaacatttggtaaagcactaaatggtgctaaagcactatctgaatatagagagttagttaccttatcatgattaccactgaccatgataacatcgacatcggggtaactactaattacttgaaataacatattaaatattctaacatcaatagatactcgtttatggaacatgtccccattaaataaaacatccccatttttgtttcgtgcatagttcatcaagttgtctaatatagtaatttgctcttttgccctatcagttccatactctgggtctggttttgaaaaatctttaaaaaagtgcatatgaaaatctgaaaaattaataatatgtttcattaattccaacctcctgaaagggtattattcaaattacttatctttttattaacatcgtttgctgtgtagttattctcatcggaatggctacttgctctattcatcgcattatctgctaacagtgcttcatgttctgctcgttcttctggtgtttcatctctaatagtcatagtttctgggagtactttaaaatacaacattttatcataggcaatcccactattattacgtaacttatctacgtaagctctcaaatatccgttactaaactcctctgatgtttggtttaatgtaaaaataagttctactgcgttcattttacgtttagagccttcgatagctcctgcatttttaatatcttgaccatagcttgctcggttcaactgagataacgtccaacaaacaaaatcatattcttgtgcaatcgcacgaatatcttcatacagtttacctcctgcatctgattcaccattacttccgcttgcatgagggtttttcattaaatctgggtagtcaataatgacaacatcaatttgctgtcctttacgaatcattacatcggagattaactgagataaaccgctaggtgttagctcttgtggtttatatttacgaatccaaaggttaccccaattcatctgttctttacccgctccatacgcttgttggatttgggtatacaagtctttattcaattcaccatcaactaagatattcttcttactttgttgtgataataattgttcaaaacgaacaatcatacggtctacttttttcctctaaaggaacataaagaacatttaaaccacgtacaacatagtttctagcttggttaactgcccaagtagttttaccaccaccagtaggcgcaacaaccatcccgacttctccacgagctagtccaccatcggaaatagcatcaatagctgtaaaaccagttgggtatttgttttgttgcaagtttgcaagtaactccatctttttatctacgtcatcgaagaagtctagcaattctgaattattgcctgctgtctcgatagtaagaatgtctctcaagtcatccattagctgttgaatattactatcagagcctagtgtgccttcatttgttacagatttcatgattgcttctcgtgttagtaccttacgaacgtagttctgaatgttctcactgataacttctgagtctacatcttcgttctctagttcgtataagtcgctaactacctcaaagactttgttttgagcttccaaacttttgttttgttttaacatcttatcttctactagtgttaataaactctgttcctctaagctctcatcatgtgttctgtaatataagttgattgtagaaacaatcatctcatatccagaatctttaaactcatccattggaattttacttagaatttcctttgcaaagaatggctcacttaatgctctataaataacttgtttttgaatttgactcatcttactatccgtccctctcccatttatatttcttatttgtcgtcacgcatatctttttggttctcccagttacttttgtcaatctctaaaatctcttgttcagtcattaaaacatcatagattctatttacgtctaacatacctacagaatctaaaggaattttctcctcaccaaattctttaatgtacatacctaacttagatatatttgttttaaacccatagtaatccgctaacatgaacattgttcttgagaagttctgtgagccccaccaagacatacttaattttctaccttgtttaataaacatttcagcttcatcatttgttacattagataatcgtgactggttacctaacaataaataaagtagttcttcgtcttcctcgttcattaataaactgcgtgcagagtttatctgaatagggaatgctaaggcatactgtgttgaagttagtccacgtttactagaaaagtttgcaacttgttctttcaagaagttagcaatactttctttagcttcactagatacgtcagattcatctaacgatttaagtgttgctgtataataagagtacaacgtacctgcttttttgtcaatatctttttatattctaagtcacaaatagcagtgtctaactgtgacaagtccttctgtggcatattgtaagcattcaatagtcctgaaataattggataagttgcaccataataagtagcttctgaattgatagacgtatacaatccatattggttctgtaacattctgtagaacagttttctatttgtgtaagcctctttagcctctgcacataacaaagtatttacatagggtgtagctcctactcgtgctttacctacagaaatcaaaaactctgttctatcaaattgcactgttaaataaactaaaggattgatattattctcttcacaatatttagctagctctacaaatttttttgtactgaggtgttccaacaaatcttctaggcaacacatcgtaattgtaagagctttcgtatgctcgtagttgttgcttagccttttttctcatctaaatttttcaatctattatatttttcataaggaatgattgtcacataagcattatacattcttgaaattaaatagcctttaaagtacgcttctggttcgtcaaaactgtcgaaaaaacttctagtaacaacgttaaactcaattttatcatttaaaatgtcttcacgttttttaagtttttcactaagtatacgtgcctcagctatctccgcttttgttctatatctgcgttttggtactttagttggggctttagggaagacttgttctctaatctcctttgcttgtttagtatcagacgtgataggattttcctttggctcaaaattaagcatatctgtgttaaacacgactaaagtccctccattcattcctctttttgtttcggtttttattaaacctagttcctctaattgattaatatatcttgtaattgttctagggttttttccagtctcttttgccatatccgttttacggataggggaggctactgtttcacccccatctctgagatttatctgcaactctctctaagaagtctgttatacctttgtttaatttaaatttttcttttaattcaatatttaggcatggactttgcaattgtatgccaccctttctttattatagttatttaggaataggaatatcaacaatttcaaattgctcatcttcatatatttttcttctctgctctgaatgttttttcaaatgtttgtttgttaaatcataaaaatcgaatacttctactttgttttctcctgtttttttcttacgtaagccccgaccaacacgttgtagtgtctgccttaaggacttacctcctgcaccaagaattaatgtgtcaatccctgaaatgtcgacaccttcatctataatcgtagaagaaatcattactttaagtgctccatcacgcatgtcctgaattttttcatcccttaaatcattttcaagttgtccattgataaagtagtgagctactccctcttcttttagcaagttactaatagcctctccgtgctctatacgattaattataattaaaatcccattacctttatcatacatcttcttagtcaactttgcaataagagaatttctatattcattgtctactatacctttttgataggcatccatatatgtagtggtttgaatatctacaggagctataataggaaatattgttattttaggtttggctgagtgacctaactcaatgagtgtgttgttagacaccttggtcgtaatctccccgaatatagcttgaagtctttgccaaagcacatgatttgtacggtcaatcgaaccagtaagtgccattctatactgagcgttattacaagatgttaacactttataccaagtatctgaactcgtatggtgagcctcatccacaatcattacagatatggaatctaaaaactccatagcctcattatacttcttaagaactttaccatttttcttttcaacaatcttttgatattccgcttggtaccctttcattttcataataacctgcttattcgtaccacatgaataaaaaaatttcttctagttcatgtttcaactgcaagtctgcttttgtcttaacttgaaaattatttaggtatccctcaagcaaacttctttggttaaaccctctttcaaatttcggggcaatatccttagcaattttcttgtacattctttctttagcagtcagcttaagtttagcctctgggtctgcggatattgcagatacaatcgtaggtatcattacaaaagtgacttgctgaatgtctttcttacctgcaccaaaagcgcctacctttatcccaagtcttttctcaatacggtcaattgactgtgaaaaaatagaagaactattcgtaaaaaatgcaatacgttctcctgactctaggtaaggggttatttgttgtataagccctgatgctatttctgttttacctccaccagtactaacgtttacaatacctattctgttcttaataacttgctccacagattcatattgatagtcccttaatgttatcttgtcattattatccccattaagcactatctccttatccatgtcctcgactgacatgaactcatcaggtctatcatcaattatctcaaactgaaaaatataacctgactttgataaagttgattggaggttccctagtattgtttctacatgaggtagtaaccctgtaggaaacgtgtcattttctttatcgaaaaaatcaataataccatcccagtaacctgctttatatgcaggactaaattgataaccgtctgctttaactcctaattctgaatgcattaccttatgaatttctggtctaagataattttccgaatcttcatatcttatctgagtatgcataatatctactactagtctcatttattaataaatctcctttaagttagattagtatacatgctccttgacatacccaccttagtataatcaatatattcattatatcacatagcgggtaattgtcaaggtgtatacagagttgatttgtcctatttcatattttttgtagtcttattatatattatttatatattatatattttatatatagttatttaaatatattagttaataatataagggaaccagaaatcctaaataggacaatttagaaactattttgataattcatctttcagttgcttaatgtctgctagttcttttgataactcatctttgatagctttaacattagccagttctttctctagctctgttctctcttgttttatagattccatagcatttttatgttcttgctcagctatagttggtttaaatataagtgcacctgagcttgtttgtctgtgtgtttctggcaattttattcctcctaataaaaaaaatagactctatatgtctattataacatatagagtctattatacttattctgttgctatttatctgtcatgttagtcataagtcttcttactcttggacggaggaaggagttttgggtcgtcatatcaagacggaatttaatggacttaaatgtcccacccgtattaatctttttcaacatagtctacacgaacaaagtcttgtgtacgttgtgttgttgtaggctgtactgtaaatgtcttccatgttttaccttcgtctgtactgtatttagcagtcacaacagttccggcaggtgtaaattgttcatatgacattttaaccgtgttgtaaggagcctctgttaagtctattgtacgagatacatagctacctttcaatgctgttaaaaaccctgcgaacataatgtcgtctaaggatagcattggtgagatgtattggttagctttaaatgttgctctaagcttagcctcacgagctaactggttaacatctaagtctacgtagttagcaataggtaaccaaggtttgtcatctactgttgtacctgcaggttcattatcaaggactagtttcatatcccatctacaaccagtgtttgcaggagttaggtaggtagacattaacactatgcggtctacattaacgttcttcataacatcgaactcaagtaccgcttcttcgttaaatttagccgtgtatacagtgaacttcaaatcagacagttggtgaatagaccatgcacttgcgttagatgaactatataggacaccttccaagtaaggatttgatgttactgtttgtgttggttcgtctactctattttgacccatagttgcaatccacattgtgtatttatcagagtcagtaatgaatactaaacagtattcttgacctgctttacacattagtgggtcatcaaagctgattttcgtaggaacacttgcatcatctgatacttttatttcagaaggttttaacactctttcagcatacacagttttgttaggttgcccaccttctgatattccacgtacttgacaaataatatttgtactgttatccttagatgcaaagaatacgtcaaagcttgttgcaactctgttagtgttaaaactgaatgattgtgccagtgggtcaaccaagttaatagtaacatgtgtttttatgataatatcctcggttgtttttaacgtaccttgtgcagtgaacgtagtacttgctaagttcgtatcgtttctaacagatacctcacgagtaccacaacgaactcctgcaggtattttaaatacccctttaaatgttccgtctgcatttgccataccagtaccttctgtggcacctttacggtaaccagaagatggggtaacaggtactctcaagccgtcaaatgttacgtataggttattagcattaggttgcaagttctctgcgtaaacctcaacatcaatttgtctcataaactcaatcattgattctttggtttgctgaccaccactggttaaagtagaaccggatagcccttgtttacgttggtcttctgtaccagaggcacctccccacgattgtccggggtcgagcgtgatgttggataccatgttcatctcatcgtttgtccaagatgctccaccatgtctccaccattgacgaacagtcatagtagatgtttcttctttggtaactgtgatacgttcatcttcaatccagttatctgcagaagggtttagctttaaggcgccctgtttgttaaaggtgttgtatgggttaacgttcattgcttccgtagcaaatggttgtctaatacctacttcttcggtaaacggtgctgttactagtctacccccacacatgtgcttcactagaaccttcgataattgttgggactgttttattaatttctgcataaggcaatgttatttctgctgtgtcaaagtcaaaagcaattgtggcatctgggtgactaacgtcatatttatctagtgagataaacgcatccgagaatactccacgtagatagatagggttttctcctgccattgccggttggtctaagtagaacactgcttggttatactccatgttttccacacgaacagataacttctgtagctcttccattgttagacgtgtgattgtccattgtttagcatcagcagtatttgagtctgggtaaactactactgtaccaatagctaaaactaatgggtctacatggttaggtgcctctactagtcttaaagcgttaggttgtcctttatggacagtgaaattcccgttatggtctaatacaattaggtctttacgagctaagaagtatttatagtctacgttaacaagtgattcatcgactggtttagaacctgtcatctcgttaaagtcgatataccattccctagcatcaccttcaccagtaattacaactttgtaatctgtattttcaatcattgttttattataaacatattgaacgaagtaggttcccccctgcaggaggctcttgccctgtaggtgcccaagatattgcttgaccatttactaattggaagtcttcaccttgcttgtactcctgtgctcctgaaccctcagtccatacacggataacttttgttacagaggtgtttttaaggtaatcggtacctccacctacaaccccacgagaaacctgttctttagcaacttcaacttgtgcagttacacggtctacagaagatactggggaattacctaatttatttttacgagttgcattgctatagtagaaaccttcgttattgattgtttctaattctcttgatttttcaatatcaatacgagtagttgtaggtttatctactttaaaacctaaaacatatgcccgacctgaatcgacaactaactgaattttattgttagggtctgttgggtgaacttctgtgtacatatcaaaaccacgaacacgatatgaaccagactcatcataagttctttctgctagtattttattaatcttgtccatctcaggagtatctgggttaatgtataactcaccgttaacaaagtggtaaatgtttgatgcagaatcatcgttaactgctagtactacatcttcgtccaatcggtcagccccttctgagaaatggctaggaacaccacttgtttggtctaacagtgatgggtcgtcttctgctgtaataactttttgtacaagtttaacacctacatactccgtaccctctccggtaatatcgatactctgttcgtcaaagttacgcattttaccgcctaagaatactttaccttttttaatagtaagcttcttatcttgtagtacgtattccataccggtctgaatgtcaccgtcactaaatatggattcagccacattgcctaaatctccttgaataattgactgtaactcgtttaactcggcttgttgtaacggcttatctggtttaaatagtaaacctgaaaatcgtttgccttggtaatatctattgttataaggctctttacctaaatcatcatttgtaatatttttagccatctatgtcacccttcctattgtttaactgacttcttattttccattgtaataataaacttctcttttaaaattacatcacttgttctattttgttgctgtctgttttcaaaaaattgcaaaatgcctgcatctgttacatctgtaggtaacaaagctttcttttctgaacttgccttagacactaagtcagtatgaatgcctacttgtctaaatgttcctgttggtagttcatctcccgtaatttctgcttctacatacaccatccatgcttgctctttatagccgtcctcatctggaattagcgtaaattttcttgaaccataggacaccacagggtatttagaatcgtcacttggtagatattctctacataaagatactcttgctacctttttataaccgataacctctgttagagtagtcgtagtagggtctggtgcaggaggggcatcttcattagtccaaggagtggttttaccaattgctaggtacatactgtcttgtttatttttttaattggagtgaggcatacactcgtgaattgttagttgcaatagccacattatttacctcttttctttatcattc

SEQ ID NO: 11 - DNA, 41274 bp, Unknown
  Description of Unknown: VREML139 complete genome sequence
ctcttccgatccttcttttcacacgaatttctaaaaacgaaagttgaaaacatgctttttcccttgaaaaacacgattcaaaactggtttcttttcaattgtatcaagcgttacacagaatgttacacatattcactattacgaaatacttccctgataacacgcatcaaaactggtttctcaaacaacacgttttgtgctataattttgttagggagttttttcttaaatttaaattatagtaagggaggtaattattattccagcaccaaaacctattatggtaaaagatttgcacacgcaacaaacacgagcgtttaagtcgcaaacagaagcagacaaattttataataaaaaatcaggctactttaaagacgtacgcactaagcttggtggacgcaatcgccattatgaaattattgaagtagtataaggaggtgaaacataatgggtagaccaagaaaattaattaatgcccaagttggcaacctcacaacagagcaacaagaggaacgtaagaaagaggaagaagcactttacaactatgagaagttagactttagttattatccacaaggattattgcaaggtgcttttcctgaatgggaacgtatctcacactttataggtgacctacctatttcagaattggaccaacaaacaatggttcgttactgtaattacacttacctatatagtgaagcaacagagcgattgatggaagaaggagaaatcacaccagatggtaagaagaatccacgtgttgacatcatgaactcatatagtaaagagttgaagtccgcaactgctgaccttggtttgacaattaacgcaagactgaaaatagtggcaccagctgaaaaaacaaaagaaagcaatgacccactaggacagttgattaagttacgtcaacaaagttagtaagttgtgttataatgtatttacggaaaacgccttccagatgatttgtagattagaataatattgggtagtattattcaggcgcaactacggcaatagttgcggacatgttagtaacatgttagtaaatagatgtgagggtctatttacaaggaaacgctcttacctccttaaccaagtgagcaaaactctattaagtgttgtgaggtagtccgtatgtggaaggtccgccaaccacatagcaacacttaatcatttaagaagggttgcagtgcgaccaattgacttagactagttatcgccttatgggaataactacctaagtctttttatttacacacagaaactattttttatgttataatgtatataacgagattaagattcaatcatgttgacttaggtaagtttgttatcccctttggataaactcatgacctaagtctttttatttgtgctataatagaaacaaggaggtatacatatgaataatatagattttgtagctgattacatcaattacgtaaggtataatcaaataccaataggtaataagattaaacaagccattagacgtcatgagaaggacttagagcggtcactagacccagattatccatactactatgaccctaaagaagcactagaaccagttgcatttattgaaatgctaccagacccaaagacacgtaagacaaataaactagctaagttccagaagtttattattgctatgatatatggttggcgcaaaaagaaaaacaagatgcgtagattcagaaaagtatatatcagcctagcacgtaaaaacggtaagtcaattctggttgctggtatctcattatatgagttcttattaggtcagtatccaaacgcttcaagacagattgtagcggcggctaacactaaagaccaagctggtattgtattcaacatgttaaaatcacagctaaaggcattgcgtgcagtaagtgatggaacaaggaaagtaaccaaagttaataagaaagacattgaacacttagaagatgaatcaacggttaagccactatcaagtgatgcagatagcttagacggactagacgtgctatgtggtgtacttgatgagtatggagaagctaaaagcacagccatgattgaggtattagaaagttcacagtcacaacaattacaaggtttaattttgattattagtacaacaaccaaaaacttgaatggaccaatgcatagcatagaatacccatttataactaagctacttaatgaggaagtggaagctgatgcttaccttgccttgtgttgggaaatggatagcctaagtgaagtagatgatgaagctaactggattaagagtaacccactgtttgagaatgcacagctacatgaaacaatgtatgaacataaggttaactcattagcagagtataaggctaagggtgacatgagtggttggctaactaaagaaatgaacttctgggtacaatcatcacaagacagtttcattgataaagaatcttgggaagctgttaagcaaacaaaaccatatgatataaaaggtagaccagtttatataggtcttgatttggcacgtacaggcgatatgacggcagttagctgggtgatacctattgcagaggaacgcaagctacttcttgacagtcacgcttttatagcttctgtgggtggtattgaagctaaacagataaaagataagataccgtatagacagtatgagaacttaggactagtaaacatcagtcagcgaccagatggtttgatagaccatgaagatatgtgcgaatggataagagagttcataacagagtatgacttagacctacaaggtatttactatgacggacaccaagcaacaccatctgtaatcaacttaagcaaggactttccagacaaactaattgaagtaccacagcgcatccagtatttaaatgcacctacaaagtacttacgtgatgcaattatcaagggtgaagtgattcaaacagacaacccactactaaatagagctgtatataacgctattatgcgtgagtttgcggacaatatagccattgaaaaggctatgaatcgtaacaaaattgaccctatagacgccttaattaatgcaatgagtgaagcaatgtactttgattatgagtatatcagctttaaagaactgattgaagaaggtaaattcggatttggtgtataaagagtgctttaactagcactcttttttctattgttttgtggtaaaatgaggtatataggaggggtaaatatgcaaaatgcggtatggttagtagtaattttctacgttttaggtatgctatcactagtcacagcaatgtttttcactggtttagtagctggtttagtagccttagcagtagcattattaattccatcagtaatcttatacaaagaattgggagaaggtgaataattaaatgggagtttttgtcgcacctagaagcacaacaaagcagaacttcattgactttatcgaaagtagtgatatttattcaacagaaatcacaggcgaaaaagcgctacgtaattcagatattttcacaggtatcaatattattagtggtgacttaggacagtcaaaatttagaccaactaagaatagtgaagctgatgaacaatttctaaaaatgattaacaaacgaccaaataataagcaaagtcattacatgttcatgtatgcaacagtagcaaacttaattttaagcggtaactcatatgcattaatccacagagataaattaggggtagttgagagcttggagtttgtaaaacctgaacaagtaaacgtaatccaaaacgttacaacaggtgaatggtcctatgacgtaacaatggattatggtagtatcatgtacaagtgtaaaccagaagatattttacactttagaattacaactgtagatggtttccttggtagaagtcctttactatcattgaaagatgaagtagctatgcaatcaaacggtagtaagattttaagcaagttctttgctaacggtgtatttggtggaggtatcttgaaactaaaaggcggttacgttgacaacgaaacaaaagcaaaaatcagacaggactttgaaaaggcaaacggtggtagcactaacagtaatggtgttattgtcttagacgaatcaacagagttccaagaatacaaaatgaatactgatattcttaaactgattcaaggtaacaagtttagtacacaacagattgcaaaagtattaggtattccattgaaccgctttggtatggaattagtaaactctacagatagtggtgcaaatgacatctatattgcttcaactattagccaatatgaaagagctatctgtgatgaaattgaaattaaaacaggtaacgagttagaattagacctcacaacattattaaatgatacctatgaagatagacgtaaacgagtttttgaaggtaaacagaataaagagttgctaaaagcaattaagactaacgaaattcgtgactatttaggttatgcagatgttgaagaaggtgaagaattaatgaaagtagatggaaaagaaggagtgtcagcaagtgaagaatcttgaaattagacagctacaacaggttgaaacagtaacagacaacattgttgagggttacgctttaaaatttgattcacctagtgagaacttaggtggcttcattgagttcatagataagcgtgcattagatggtgttgatatgagtgacgttcgtatgttcgttgaccatgattcaagtaagttattaggacggacaaagagtggaacgctaaccttagaggttgacgacattggtttaaaatttagagcattacttcctgatacatcagttgggcgtgatgcaatggaattagtgaaacgtggtgaccttagtcagtgttcatttggattcacagttgctaaagatgaatggcgcaaagctgatggaatcaaccacagaactatcaaacaaatcaaatcactatttgaaatctcactggtttcaattccagcatatgcagacacagatgttagtgtggctaaacgttcattagaacaaatggaagaggaagcaaaacaatttcaaaagcgtaaactagaattagaattaaacctattagggttatacaagtaacacccacaagttcccttgttcgtgatatactatctttagtaagaaaaataaaaaactaaggggtgtgcgtatgtcacggcaagaacttatggaacaagcacaaactttattatcagaaggtaaacttgatgaagctgaaaaagtaatgcaagaaattaaagctttagacgaggaaaaacctaaagaagaagaacgtgcagttgataataaagacgaggagaaaccagaggaagaacccaaagcagaagaagctaaggacgaaccaaaggaagaacctaaagaggaagccaaaaaagaggaaccaaaagaggaacgttcagcaaaacctgaaacagatgttgaagaacctaaagaggaaccaaaggaagaacctaaaaaagaaaaacgctcactagagcaagaaggagacgaaaacatggagaaagttattttagatggaaaagaagtagaaaataaagaagtgcgtggattcttagaatacttacgctcaaaagaaacacgtgcattgcctgaatcatttgaaggtgttaagtctgcggatgcttctgcaattatcccagaagaaattatcacaaaagctaaaatgttacctgaaacagttgttgatttacgtaacatgattacacgtcaaaaagtaacacatgcaatgggtaaatatccaatcttgaaagctaatgaagcagtattggcaacagttgaagaacttaaaaagaaccctgatttagaaggaccagctttcgaggaagtaaaatatgaagttgaaacttaccgtggtcaaattgcagtagcagaagaagctctacaagattctgatgacgacttatctggaatcattgcacgccacatccaacgtcaaggtttaaacacagctaataaagctatcgttgctaaattaaaaacagcaacagcagtagccgcaacatcaattgacgacttgaaaacacaagttaacactggttttgacccagcttacaacttagaatttatcgtttcacaatcattctttaacgctttagaccaaatgaaagatgctaacggtcgttacttactagaagacgacatcaaagcacaatctggtaaatctctattaggacgtaaagtaactgttttagctgataaattaattggtacagcagacggtgacaaagtggcattcttaggacaacctgatgcattcgcagtcttcttcgaccgcgtagacaccactgtacgttgggttgaacatcaatattacggtcaagtattagcagtagcaatgcgctttgactgtgaagtagttgatgcaaacgctggtaaatacatcactttaacaccagcaccctagtacaccacctgtagtaggacaggtgacaacgacagaaacatcagcatcaattgaattaagttaaccaatgagggtagggcttgcgctctatcctcttattatattataaaggggataagataatggctaaagtatttaatgtatacaagaaagatggtacaaaagtattaacagaggttgcatcaccagcagttataactggtttgacagcagggacaacatatacaaaaggtgattaccaagtatcagctattgaagatggtaaaccagaatcgaaaaagattgatattccagagttcaaaacacaacctgcagtggttgaaccagaagtaccagcagaataaggaggtataatatatgttgcagttagaggaagttaagaacaacctaagattagactatgactttgatgatgcctacctacaaggcttgattgataccagtgaactattcatcttaggagctattgaactaaagacagcaccagatgataaacgattcaagacattacagttcatgttggtttcattatggtatgaaaacagagtaccagcaacaagcgcattacaacaacaagtaccctttacaatcgtagcaatgattcaccaattaagggggttatatgatgtcactgataccaacacaacggcttgataggaagataagtatccaacataaaaccactcataagaatgaatattatgagtgggtcactgattgggaaaccaaaggcactgtatggtgttcagtaaaacagcagtatttcaaagactataaagaatcactaggtacagtgttagaggatacaacaaactttattatcagatatgaacaacattttcaaattgacaatagtatgcgtgttgtatataacggagttaactatgatattattcaagtgttagaaggtagtttccaacgtgactttacaacccttgtatgtaagagggtgaataaatgagcagtccaaactatgttgacttttcacaagtctacaagcaattagaaaaaagcggtaaaaaagctgacctaatagttagtaaggcggttaatacagctggtgaaaaagcaatgaatgaactaaagcaaaacacaccacgctttgatggtaagaagtatagtagggatggtcaggactacaaaaaagaacatatgcgtgaccatgttgtaatgagtaaagcaaataagaacaaccatatagcagaggttggctttgatgatgatgtggcatggatggcacactttccagagttaggaacaatcaagcaacgaccacaaggttttatacaaaaaaccatgaatagtatagaagatgaagttgcatcaatcattcaaaaagcattacaggaggcgtttttaaaatgagattaccagtattacaagtagctgaaacactagagcaatcacacccagaagtcaactggtttactaatgaagtacccactgaatttcaaacattaccaaaattaccagtaggtagaatagtagaacttgacggaaggtacacagaatatgccagtgcagaccctaactattttgtaacacatgttcaggttgatttgtggtgtgaggatttgaaagaagttgaaaagtattactttgaaattgacaagaccatgcgtgcagacaatgtgcagtgtgtattatcacaacaaagctacgacccagacttagagggcgcacgtagagttatcaaacgttacacaatcagtcaaagggttgtctaagtgacaccctaaaagaagtgttttagtgatataatatctatagtaacaaaataaatatattgaggagtggttatcatagctgttgtaggatttaaaaaagcaatcatctcagtacgaggtggagtagatggaacgacaattgaaaaacatgtaattgacaaaactggtggaggtactattgaagcatctatttcaggtatttcagcagaacaaacaactgtttatgcatcaaacgttccaatttgggtatcagctaagggtgttggtgagttatcagcatcattaaacgtgtttgacttatacaaagatggtgtatacgagaaaatcttgggtatcacacgtgatgaagaaggcattgcatcagttggcgaagatacagaagcaccatacgtatcagttacattcgtagcagatggagcagatggtaaagaaatgtactttggtttaactaaaggtcgtttcagtcacccagaaatcgcattgaatacaactgaatctggtggcactgaacctaacacagaaacaattgaaggttcatttgtaacagacgaccgtggtattgcttatatgtcaggtgtatctactgaaacattaacattagataaattcgttgacaaattaaacaatgtgactgcaccctagtacaccacctgtagtaggacaggtgacaacgacagaaacatcagcatcaattgaattatcataatttaaaaagagtacttactaaaatgtaggtactctttttatgtacactggtttcaccaacacccacaaccactggtgtttatgctataatatctttagtaagaaaaataaatttattggaggaatcaattatgattaaaattacactacaaaatgaagaaggaaaaagctttacagtcaaacaaaaatcaatttcaactcgttctatgcgtgaactaattaaattccatgcaaccgttgaaaaagttgaagctggtgaagttgaaatgtcagaattacaaatgattgatgaaatgattcaattagtagctgatatgtttatggacccacgtgttacatttgatgcaattcaagattcaattacagctgatgacttaatgcctacgattgaagatattttctcaaatgcaatgggaagcaatgacgaaggaaaaaaagcctaggggctgatgagttaaaagaattagaaaatacgtcattcgcagaacagttagaaaactttgatgacttatatagacaactattagaaagtggtaattggagtttatcagagataaacaatgctgattactactttcttttagatttatttaacaatcagaaagcccctaaaaaagagaagaagcaagaccctatgtcattctttggttcagtattatcaccagcggaaatggctagagcgaaaggagaactagactaatggcagataaaccaattgggaatatgaagtttggtattggtgttgagggtgtagacaataccattaaaacacttgaccagttacaaagtaaaatgcgacaagctgaaagtgctatgcgtgcaaatgcaaaggcttttgatgacggtggtaagagtatgcaaggtttaagtcaaaaaacaaaagacttaaacacagtaatggggttagaagaacaaaagattaagattttgcaaaagcgcagagatgaagccattcagaaatatggtgctgaatctaagcaagttgacaatcttaacactaaaattaatcaatcaacagctaagtataatgcatacaaccaacagttatcaaaaacaacaacagcactagagaaacaagtggtttcttcaagtaaatacggtaaacaagttgaagctaataacaaggcaacagaaaaagaagttgctattgccaaaaaacacggtacagagatagacgttgttaaggcaaaacaagagggtcaacgacgcaacctagagataatgaacaaggctgtcagagaacagtcaaatgaggtcacacagttaactaagaagtatggtgctaactcaacagaggtaaaagaagcacagcaaaaactacaagcatacgcaaatgaagcacgcaaaagtgaaaagaatgtggatgctttaggtgatgaactaaaagaaacagaaaaagcaatgaagggtgtaagtacagaatcaaaagaagctagttcaagtgctagtaagttagatggtgtgttttcatcacttaaaaagacagcttctggtgtaggtagttctatcaagtcaggatttggcaagattggttctgctattggttcagcaacaaagggtgtaggtatattcttaggtgctggcgcattaggtgcagttgcaaacattggttcaaaagcgtttaatactgttaaatcatcaattgatggtgcattaaataggattgatacattaaacaatagtacacgtgcctttgagaacatgggtgtagctactggggatataaccaagaacatggataagctacaggaagcaacacgtgggttaccaacaaccttagacagtgcagtgagtaacgttcagttgctaacagcatcaacagatgatatgggattatcagttgacgtatttaaagcaatgaatgatgctatcctaggttttggtggggatgcacagatggttgatagtgcggttgttcagttatctcaatcattctcaaatggtaaggtagatgcgcaaacgtggaactcaatgattaacagtggtttaggacctacccttaatgccttagcaaaagaaatgggcatgacaacaggggaattaaaagaaggtttgtcatctggtagcatatccgtaagacagttccaagatgccttagttaaaatggataaagaaggtggtggcggtcttaagtcattagaaaagatagctaaagatagtacacaaggttttggtactgcaatagccaacatgaaatcagctgttacgcgtggtacagccaagatgattgaaggactaaacaaatcactagaaaaaatgggtctaccatctttccaagagcagataacaaacacaggtaataggtttgaagctttcttgggtggattaggtaacagcctacctgaattagccaaaaacctttcatgggttggtaaggtattcaagggtacatttgatgtatttggaaaagtcacaggtgaagcgtggggttacttatcaggctttggtaagaaggttggtatgtgggcagaaaacattaaacgcatctggaaaggtgagggtctcataaatgttggcgcgcttggcttagatataaagggaataaatagaattgacagtgcagtaaacaatttcaaatcatcattaagtgggttaaaatcatggggttataactttaaatcagcatgggaaggtaatggcttagttgacttagacatgcttggtttatcagacgaaaaaatgaaaactgtatccaatgctattgtaggtattaaagaatcattaggaagatttaaagattatatcaaaaatgcgttcacttttggtactggtgacggtacaccagcgggattctttgaaacattaacaaaagtagttgattttatcacagttgagattattccaacagttataccattaattgacaaagccttaaaagcaatcactaagttacttggtggcgctcaaaagattttcaaaatagtattagacttctttgtaaaagaactactaccaatgattatgccaattattaaagagttagcagaagccttaggtaagatatttgacaaaataagcaattggtgggaccaaaatggtgaccgtattggtaaggcaattatgaacctacttacactattgaaaccaatctttgctattgcaattgaaattgtaaaatcatttgttaaatcagttgtggggttcattgatggaatggttgatgtaatcacaggtattattgatgtattttcaatggtattaacaggtgacttcactggtttgtgggatgcgattaaacgtatcttctttggtggaatccaagccgtttgggaatggttcaacctaatgttcattggtaagattttcaaaggtgtaaaaggactaggtacatcagtaaaaggcacagtgaaagccatgtgggacggagtcaagaacttctttacaagtggcggaagtagtgcgggtgcgttgtttgataagtttggcggaagtatcaaaggtatagctaataatttcaagaatgcaatcaagaacacagtaagtaacatgtggaatggtatcaagaacttctttagtagtggggcaaatggtgctaaaaatatctttgacggatttaagaatggtataagtggtattgcgaacactatgaaaaacctagtaagcagtactattcgtaatctttggaacggtatcaagaacacatttagtacaggaattaaaacagtttcaggctggtttgctgatttaccaaaccaaatggtgagagcagttaagaacggagctggtgcaataactaatgcgtttaaaggtattttcaacggagtattaagagccattggcggaccagtaaatggaatcattggcggtgctaactgggtactagaaaaatttggcgcaccacaagttgccaaatggaatgtaccacagtatgaacaaggaacaggttcaggcggacacgttggcggacctatggtagtaaatgatggtggcggagctgaaatggtaatcacacctgatggtaacgcaatgatacctaaagggcgtaacgtaatgatgaacgcacctaaaggtacacatgtattgaacgaacatgaaacatcagctttcttaggtaaacgcgggcgtgtgccattctacaaaaaaggaactggtttcatggatggtgtaaaagacatgtggtctaatacaaaatcatttgtaggtaacggaatcaacaaggtaaaagaaacaatcagtgatgtaatggactgggtaggtaaaccattagacctagcacgcaatgcaattatgggtgcaatggacttaggtggactatcacacatcccacttgacatggcaaaaggattaggtagtaaagccacatctgcatttgctgaacaggttaaagcattattcaagaaaaaagaggaagaagaatcagctggtgctggtggtgactgggcacctgttatccgcaaggcggcgaaatacatgggtcaatcaatcagtagttcacaggtagctggtttagttgctcaaatcatgcgtgaatcaggtggtaatgaaaagattgttcaaagtccagatgtggttgacattaatacgttatctggtaacccagcacgtggattactacaatacattccgcaaacgtttgacgcatataaagtcgctggtcacggaaacattaacaatggataccaccaattgttagcattcttcaacaatagcaactgggaaaatgacctacagtatggtaaatctggttggggtcctcgtggtcaccgtatcagagggtacttcaatggaggaattgcaagaacaccacaaattgcaagccttgctgaaaatggctatccagaggttataattccaactgaaccatctaaacgtggtagagcaatggcactacttaaccaagctaaacagatgttaggtgtcaaagacgaacgcaaccatgtaggtggcagtggcgaatcacaagacatggcattattggttagcttaatgcaacaacagaacgaattgttacaagctatcttagctaaaaacacagatgttatattagatggtaagaagatgaacaaagagcttaataacctcaacagaacacaagaacgaaacactagacgtaatctaggttatatttaaaaacatcaaggcaacccctttacaagggttgtcttttgtgttataatactagtatagtgactaagaaaaggagataatacacatgaaagaaaactataattttctacgctcatttacttttgacggaaaagaaacaagccatctatttcaaatagctaaagttaacgtaccatttttatcaaaagataatgatttttttcagattggtaacacagatggtaaacactttagaaatacaagattaggtgacttcgcaatcagtattgatggtttcattatttcagacaatagtggtatgactgtatcacaaaccaaggatgcgcttgtaaagattatcaatagtgatgaacctaaaagacttatactagaccagatgccagatagatattttaacgcaatattcacaggcacagaagagtatgacgcaacagacacaaagtacacaccatttacattaacatttgatgtacctgatgccttagctcatcagattgaagcttcaaactttaataatgtaataactaaaaatagtaacatggtattagattcaaattttgagcgtaaagaccagtactataaaccttgggcgcagttagccattgaaaaacaaggtgaaagtaatgtattaagttgcgacttcaccgctggtataccagcctattatgttgacaacagcacacctcaccaagcatggttcttctatgatgcatacaacagacgtatgaatttagatttaaatgtaggtcaaacagtgggctttcaagctaaggtgcgtattaacgtagtagacaacgaggtacgaccagataagacagcagaactaatattgatagaatgggcagacaatccagttaggaaaacatacacacatgtgattgagatgcctaatgaggtaaaagactggaccatgtacgcaaaaacaataactatcaaaagtccagaaacaactggattatcaatgaactttggtttatatggtgaccatgttagtggtgatatatgcgaacctatgtttgcaattgaccagacaacaccaatgacttaccaagaatcgttgattgaactgaaagaagaattaaaagttgtaaataacggaacatacaaagcctatccacgcttttcatttaaaatgaatggtgaaaatggattggttggagtggtcaataagagtggtcagataatccaaataggtaacccagaagaagttgattatacagaacaatcacgtactgaaacagtacaggtattagatttttggggtactgaactacctactggaatggtagaaaacactggtttcgtaagtacgtatcctaactatctaggtaatgtaggaactcccaatctctttgatggttctttaaatatggtaaaagatattgattcagtattaccaaacttcacaaacgaaaaagaaggtgtgtggcatggtccttctggtgttataccaattacagcaccatccacaaacgataggacatctcactttatagcaaatattcgctttgtattcaataattatcgtgaaacatcacctatggcaaggttagagtatatgatacgtgctactggaggtgaagctgttataagtacagtctttagagattcattaacatcagctaataccacaatcatggaatgttggtataaaggtgagttggtacaccaatacatcttagataaaaagaagtttggtagtcttaaacttgaaataaacattgaacgtgctgaaacatatgtcaaatggcgcttagcttcaatcaagagtataaacaaacttgataatgtagtggttggagataactattcatttgtatataatgttgaagatagttcagacctatcacattttggattctgggtgcaacaattctcaaacaataaagccaacacagtaatgataactgatgctaaattacgttggttaaatgtgaagtacattaataatgttagaaattattttaaagatggtgatatagttgagttagatacgtactcacgtaatgtgtatatcaatggtgctataaacaatgaattgaatgttgttggtaaccagtgggaacagttccaactcggtttaggtgagcatgatatactaccattaaaatcatcttgggctttacaacctgaggttaattgcatcttagaacaaacatacctataacaatatggggctttacaagcccctatcgtttgtggtatactattaatataatatataggaggtatattcatggatttttatattacagatagaacatttaaattattagatattgtatcaacaaatggtggtacactatttagtgtggtaactgctgaggatactgttcagttatcaacagcaagcagacgtatggcattggatgttacatttacgcaacaaactagcgcactagctaaagaaacgttcaaagtaggtaactacgtactttacgttgacaagaatggtaagtatgagtggatgacaattttaagtgttgaacatgacccattaaccctagttagaacaatggaattggaagatgcatcactagacttgctgaaccaacatgttgaatcgtataaggcaacacaagcgtttccaattaagtattatatcgaagaattcgctggaagtagtggtttcaaaattggtgttaatgaaatcagtaagttatctagaaaattagagtgggattcaggagcaaccgcattggaacgtattcaatcagtagcaacgcaatttgataatgcagaattagagttcagatttgaattcaatggtaaccagttagttaatagatatattgacattaaaaagagacgtggtacagataaagtacacactctatatgttaatagggatattaattcaatcaagactaaagaagatatttaccaattagtaaatgctataaaacctattggtggtactcctgatggggcagataaacctgttgacctgaaaggttataactgggtagacccaaataatcgttttagattagataaaacaactggtattatatatgatagagagaacatcaaacaatggtcacgaacgcatacagatgataactatttcttacagcagttagactttgaaacaactacaaaaaacaaactagttgattacgcactaaaacacttgaaagattatggaaaaccactggtttcatatgaagttgatattgctaatatcccatacaatctacttgttggtgataaaattaaactagttgacgagaaggaagagttatatcttgaatcacgtgttcaagaactaaaatatgactataccacagatagtgttgaagctacgttatcagactttgtagtaattgaatctggtataaatgatgagcttagaaagttatcagaccaattgaacactcagattaataataaggttgcatctattcctaaagtatatgttcaacaagaaccgccagttaatccaaaacaaggtgatatgtggtgggttgttgatggtactgtaccagttaatgcagttaatagattaggtgaccttgaaacaagagcagtaaaagaaaatcctaagatagcatcttataaggtttgggacgatttaaaaacagaatgggttgaacaaacaattgaccaagctgtgctaaacattgaaacattaaacgctatcacaatgaacggttctacaatcaatggttctgaatttttgaatacatttaaagcaacagtagctggtgaacaattagaaggcgtatcaacagttgctggcggtgaaatggaaattgaatacaagaacttaacaacgaatagaacaggttcaacaaggttgttttcacaaggttttgatggacgtgtactaaacactgatggttcaattaatcaatatgtaagcttaacaccagctggtctatcattacaagattcatctggtcacagtggtttcctaactgctgaattagtaatgcaatttgcaaacactggacgtaaactctacaatggtccatcatgggttggtgaaaatgatgttataaaaccatctcttactatgagtgatgttgcagtaggttggctttttctttggcaaccatatgatactacaaacggaaaccccctaacatgggactatacttattttctagttccaaaggcacatgctaattataataatggtaaaggtattgttatgcgactacaaggtgcttccactggtggtggtgcagatgatattatatttaaatatgtgtatgttagtaatagtgaaataaaagggagaatacaaaacagacagggtaacggtgctaaatgggtactaacagcagtgttttcagtataggaagggtgatataattgaaaatttggattaatgatagaataggtttcttaacaggttattcaacagaaccaaatgaaggacaaattgcggttgatattgacattacaactgcaaagtctatggaaggcggattgattgactttcataattactattatgatggtaaagaattgaccagaaatacagataatgatttccaaaagtttttagatgaagaagctagtaagccaccagaaccaagtaaagaagaaatggctgaaagactagcaaaattagaagaattactttctgatttactatagttaaaaacacctctaaaaagaggtgtttttatttgcttttaaatggataatcacccaccttggcgactgaaaaacgcttagaatcctcctatgaagcacactatttcccctatttaagtgatatactataatagtagctgaaaggcggtggtttactataaaataaggagatgctgacatggaagaaaaggactttatggaaataaaagtacaactagcaaggattgaatcaagcttagaaggtattccagaattgaaaaatgagctaaaagcaaacaatcaattactaagtgaaacacattaccgttctattcaaaatgaaaaggacattgctagtataaatgaccgcttaaaatggttatcacgtactgtaggtagtgcaattattgtggctgtcattggtgcgattataacaatattataaggagagtgtataacatggattggaaaacacgtatcagaagtaaagcgttttggattacattagtaccagcagtagttgttttaattcaaatgattggtaatatctttggcttagacatgagcaaactaactggtttgagtgaacaacttattggtgttattaacgcactattcgttgtgttaagcattttaggtattgcagtagacccaacaacaaaaggtattaaagataataaggaggaaaacaaatgaaattaaaaggtattttattgtcagcagtaaccatgtttggtttacttgttggcgcaactaacgtacaagcatatgaagttaacaatgaatttaatttacaaccgtgggaaggtagtcagcaactagcatatcctaataaaatcatcttacatgaaacagctaacccacgtgcaacaggtcgtaatgaagctacgtacatgaaaaacaactggttcaacgctcacacaacagctattgttggtgatggtgggattgtttataaggtagcaccagagggtaacgtatcatggggtgctggtaatgcaaacccatatgcacctattcaaattgagttgcaacatacacatgataaggaattgttcaaaaagaactataaagcatacattgattatacaagggacatgggtaaaaagtttggtattcctatgacacttgaccaaggttcttctgtttgggaaaaaggtgttatctctcataaatgggtatcagattatgtatggggtgaccacacagacccatatggttacttagcagaaatgggaatcagtaaagcacaacttgctaaagacttagcaaatggcgttcagggtgattctaagccgtcaaaccaagcaacacctaacaaaccatctaaaccgagtgtaacacctcaaaaacaacgttttaactatagagttgatgggttggaatatgtaaacggaatgtggcaaatctataacgaacatttaggtaaaattgactttaattggactgataacggtattccagttagtgttgttgataaagtaaacccagctactgggcaaccaaccaaagaccaagttctttctgtaggtgattacttcaatttccaagttaattctgtaggtgtagtgcaagagcaaacaccttacggtggttatacattatctcatgtacagttaccagaagagttcatttggttattcactgaaaacaaaaacactttattatatcaataaaacaaaaagacaccctatattgggtgtctttatttgcgttttaatggataatcaccttactttgaatctgaaacgtgcttagaatgctcctatgaaacaatggtttccaagatatttggtgcatatccaccaattacaacaggttcatcatcaacaatgtttttaaatacaacaggtagtgaacggtatcctttttccattaaatactctaacgcttctggttcttcatcaacattgtgttctttataattaactcctaactcttgtaattttcgttttgtcattttgcaaggcatgcaattgtttttagtatatactgtaatcatttaattaactcctttacataaatatttttaggttcttgttcaatataataagcttcaccactgtttaaggcatcaactaatcgttgcgcaaatggtttcaattcacctttgtatttcgttcttattgctttatcatgatagattttatcaccatattttataactttagttttagttgtctttcctactaacgtgaagtttgttgctttataaatgataccttcatgaccatggttagggtctgcataacttacaatagtttttacagttgtattcttacgtaaccacttcaatgttttaccaatgaagtacgattctgcattacgcttagtatcatcaatcaagcacaatctacgtagctctaaaacatcctctttgttttcaccatactttttccacacattagccataccaagtccaccatatatcatggcaccaattaattcatcaccacaatatagaccaaaacagtatgatgattgtagaccatttatagagtgtgtataatgccattcttcaataaaattccgaattacatttcgtgctactggtaaaacagtatattcctttacacttttaacttcaagtgggttcatttaaattcctcctaatagttgataggtaaagtataacaccttacctatcttttgtcaacactttaatcaatataattttttacttcaactggtttgaatccttgtaattctcgttcatgatgggcttgttcaatacgttctttccaattttcaccaaaccatagttcaagcgtatcttctacttggtcaatatagtattgtttgtcaacttcatcaattgtaataccttcgccaatcgcttcattactgattgtgtagtactctggtgcgtttgccaatccttttgtatatgaaatgttatctttaaattcatcagcttcaatatctaataattgaccttctttgaccttaaacaattctactgcattagttttgtcttttactgcgaatacacggttaaccttttgtgcgttgaactcattaccttcactatcacgtgcaaccgttctatcaaaggtccagcctgttttagtaataatttgaaactgtcttagttcattacattcattgataaactctttataatctttaccagccactagataattaatgaacgcattagatacaatcgcttttgacactttcataccacctgttaagccaatagcaccttttacctttacttttccatttggttgtactgcaatatagttatttacatctttttgccaaatttcacggaacatgtctttatctagtgtaagtccaatcttgttagcaaattcatctaatgcttcatcaatagctttgtcatctgcttcgctgtttggaatatacgcgtgtgcgtccgtatttgattgaataaactgtgctttacctttaattaattcatacatgtttgtcataatcaattgaccagttgcacaaactaagaactggtttcttgggtcatatagtccattaaattcagcaccagatgcaccaaacttagtgttaagtggtaacttgataccgttaatcattacccaagttggtacttctacaccattaatatcagctgtttcttcacctgaatacttagcatccatacgttgtttaagtaagtcactatagcggtgaagtttatcttttggaatatttcttgatagtagattgaactgaaccattgtatttggatatagtgaaccccagtcacgcattgggaacaatccaatatgaatatagctaggtactgcaccatgcacaccaccactaccaaataccatttcatagccatcttctgtagtgtagtttagtgacacatttagtttacccttttcatttagttcaaactcatgattcaagtaagcttctgcaatctcttttgtattaatgtttaatcgtttatctaactctaatgggtctgtcaagtctggtctaacttcttgtttagttgcaccaagtaatttagctgtcaagttagcattggtttgtaataggtctgtcttatccatgtcaaacattaaagcaatagttgctttagctaacaacatactaatgttttgttcaaaacgtttttcagtagctaatacatcattcatacagtatgcaacatttttctctttttcttcatctgtcaaaggtctatccatgtcaaaatctacttctgtttctttaatgttgatacctaagaatgctgaatgttcttttaagctaaaacctttgttatcttggtataggtccattccaaacaatggtgttttatgactatcaaacatcttgtaaactagacccctattatctgattcaatgattgttttagacatttgataagcgtttttgccttgtaaatagccacgcattacattgttatcatatgacgcattgttatacccaataaacattgaatcacggtattcaaggtaaaacttgcgtaattcgtcaaggtcattattaatgataaaccattctttggtaaagtaatcacgaaatacaaataaactgtcatgtttaaaaatctcaatatcaaataataaaatggtttgttttgttaatgcttcacttggtttaaatggtacatcattaccacttgaaatacttttaattactttgattgctgggaaaccattggaataggttaggtcaattaacattctatcacctaccttgcggtctttccaattatcccaatcctttttacgaaacttcataatgtacgccataacttcacgtccatcatctaatgaacgtaatttgataactcgcatttccttgccttttgctgaaagcttttcagttgattcaataagtaccacatcatgcctacccttaatcattgggtcaaagctctttgaattaccttttaaattactgaatacctccaataatttttcagctagttctggtgcctttttaaattctgcaatatttttcatgtgttaattcctccaatttgtttatactactatcttactttattaatgtgattctgtcaagtgtttttgttgctaatttcaactcacgttgtaagaacccttctgttgctccgtttgcgaatctacagataagttctacaccatcaattggcttaaatacctttgccaagatatatactttatcacctttgttaccaataccgttgtggttgtcatttttaagttctacatatgtgcctattttaaagttgtttttcattgtcattacctcctatatatataataacaaaacccctaacataagtcaagggttttgtttttttatttttagaatggtaaatcatcatcactaatatcaattgaattaccttcaaccactggtttttgttctggttggtcctctgggtcaagaggtaatgcttctaaccaaccaacgttgcttgttgggtctaattgatttttattaactgtaacatcaacaaccattccaaccgctttgtctgctgtttcccatgttacattaacatcttcaaatagttcgctgaatctcgcttttgcttttacaagtttagccatgttaggaatgaacatttcttttttagcaacccatacccctgtgttgaagttgaatgcgtagtgcttacctttatgttcaataactactgcacgtcctttaggtgaatcttgaatcgcaacaataggtgctttcttaatacgttttaagctaaccagtggtttctcaattttgataaatccagaaccttctgtaaagtatgctttacctgtttgttcatcaacatataactcaatagtgttatcttcttcaaacgaaccgccagcaacctctaaagcttcattatattttttcattgcttcttctgaatcttcccattcgccagcttctttattgaattgttgtttgtacgctactgcatcaaacattgctgaataatcctcttttgcaacttgtaacttagttgaaatttctgaatcctctacactcacgataactaatttttgtaattctgacataataaaattcctccaataatttgtttttatttttactacttaaatagtataacatagtttccctaacttgtgtaccttattttccaaataaaatatatttctttttgcaatttagaaatacatttactggttccaatccaccaccttcgtatacacttccttttataatagtttcatcatcatttgaaaccatgttgaagtcatagaactgataacctacaccatcaatccacacttgttgactaaaacttgtcacaccaactaccaattctacatcacgcttaccgtttaagtcatgtaatttccaatcaaataaacccatttacatttcctcccattcaatacctaattttttaagtttggctaaatctgctgtcttaaccttaatacaagtataactcacttcaactggtttgtcaacaactttatcttcatttcctgttaaaattacaatttcaggaactttcgtttctcttactcgttgttgttcagcttccagtcgttcacgttctgacttcatttctttaaattcttcaatagcttcattcatattgaaaccatttcttgaatatgcaataagtattgccatgcggtcatctttgtctgttacctgttctttcaagtctgaatagtcttgtttaaacagttcaaaatacatcacaattgcttgtgtgattgttttttgtgaggttgctttattagttactaaacttctgttttttgcaatgaacttatcaaaagatagccattgtggcgcattatatgaagcttggtacttattgaaaagttcttcaatttgtaatgtacgttctttttgttcttgctcgttgaacgttttaatttgtacattaacatgttctataccttcctttagtacatcttttaaagtctgaatcttctggttcaattcgtcataaggtgtcatgatttcacttttcactagtttacgttgtgtgtctagctctctgattcgtttattgattgtagctactagttttttattctctttgattgtttcttctgtaacttcttgctctttcattttatcagccaacttctgtgcgtcatttagtattttttcatagtctgcaaattcgattgactgaacaccgttggttttaattgcaatttcaaattccattgcgttcgtcctccgcctttaatcgtaaccacttagctttgaaaatctcgttaaatgtgaaccccattttaattaggtccgttcgctcctctaatgtgtttagtaggtcatttacactatacccataatctaacattagtaacattttataactcatttgttcttgctttttttccatgcttccacgtcctccattgtcaatctgttttcatcttttttagtacgttttaatagtccttcaaaagttgaatatgtttcgctttggtgtaatggtaccacaattgaatttggtttgcaatacttttctgtaaattctttatgttcagttgaagctaagtgacgatatgaaccattactaaaaatatcaaaaccagtgtgtgcttttgttgattcataaaattcaattacttgtgggtcatagttagattctaacagaaagtagtctacttgtaaagagtttttatctaaatattcctgataatctattgtagtgcttaaatcagttgcatataataatacttcaccagattcaatatcttcaataattaatccatgacagtcaactaattcttcaccagcaccatgatagttctggatagttgtgaatttcattgtaccaatttgaaactgaaagttatcactaaaaacaacatctgcacccattttagttttttcaaacattaaattatttacttcttcatttgctagaattttaatatttgggaagttctcacgtatttttctaaatactgctggtttgaaatggtcaccgtgtctgtgcgtaaatattaaaaaatgtttttcatatagtaatggctctataaatttgtaaggcttacctgcatcaactaatatattaaattgattagtatatattgatactgaatttcctttactacctgtgtaatgtacgttccatttgaatgtcatttgctacctcctaatactgtgatggtgtattgcgttcagaccatgggttgccctctagtgaccacaactctttaccaagtcgtttagcattatcccagttatctttgtcaatcgctttattaatttcaataattaatttgtgacgcttatcctctacttttttgcgcagtggacgtgctacacgttgtttaccttcttgtgggttaatagcccacccaaggttgttgcagtgcgtgttattaacatcagcatctttataatataggtagcctagattatctttgtttagtacaaatgattcagctactaagttagcaataaaaaacttacgtgtcttgttgtgtgagccttctaatactacatatggtttaccgttgtcatcatatgagttccagactgttaaacctgtgtcacggtctattacatatcccatgtttgaaactgcatacttatcatacggttcaaacaagggttcaaatttttcaatcatttaagttcctccattagtctttttagttgttttttacttaatataatttcgtcattgtattcactatttaaatacacaacacaatcaccatctgggtattgtgttacttccagatattcttgttcacttaatgaagaattacaatacaacataatctttttataatcgcctatatctcttttgaatactcttactaaatcattttccatagccatattacaaccctctttcttcaatatcttcaatcagccaacttaggtaagtttttgcttttttaaggtcctcaagaccgtttttgtgtttataacgtaatggatattttagaatatttccttctaggaaaccacggtattcttcttttgtcatgttagctttcattatttgaattggttgaataccgttaactgtgtaatgaatttgattgtcaatcaaatctgattcaaaataaacttctacatcaggttcaacaccatcacattttgaatcttcaaaattaacttctaattcaggaataacaaaatggtttttaaaagcactctctgtagtatatgtgtgcgttccgtcatgatatttgactttccacataccatcttgaagtttatgtgctacaccttttaaaccgttgtctttgcgttttactaccattccatcttgtaatttcataattaattcctcctaatgttttataattataattgtatcatattgacgtttatttgtcaacacaaaacttttattttatgatataatatatttatagcaaaggtgattcctcccaccttcaactatcttaggtcaactcgtatgagttggcttttttattttgcatattttgcgataagtttaaaaacttcttgcgccgtttcaatattttcaaatttaacaaatccacttgctacatgttgcatcattactgaatagttataatttgtactatacatatcaccaaacccatttgggttgtgctttacatcaataagccaaccgtttgggaacaattttctaaacatgtgtaaattattcaacttcttcaatcctttcaaatttaaaacctttagtgtgttttctttttccgtttaatacttctgatattgctccacaacttaattttaagcttttactacaatcatttaagctaggatatacaattccgtttgaacaaagtataggcgtacttctactttgtttacttcttgagacacctgttccgtgtcttatattttctaaatgtgaacaccattcaagattggaaaccatgttgtttgttttatcttcatccatatggtttacatcttcatagttatttggattatctaagaagtgtaatgcaactagtctgtgcaatctaaaggtggttcgtttaccactatctgaatataatcttatatacatatacccagctgttttgtttttggtagctttcataattcttcctgtatatttatttttaactctacctaaattagatacgcagtatctactatgtttatcaatctctatccattcttctaatttctcgtttgcgcactgattcatatgttcttaatacctcctcttctgatagtggtggatttaatgatatttggttaacgtatagtgaccatacacgcacttcttcatgttctaatccagttgcgaataacttaccaatgatttgtgttaaaaagttgtttcttccccctgcatcacaaccggcgattatgtctccgagtaagttagctgtgaatttacgttcacgttttttgtttttcttttgaatggttttatctgtaaatatatcaaaccattttgcgggtaggtctgcgattggttggttgttaatcacttgatatttaagaccatcaatagttgaaccccagccaacaacatagcgcccatgtgtttggaagtcaacaccttcaagttccttgtggttctgaatgaattgcacatcattatatttttcaggtaggttgtaatacagatgaagcccaccacttggtgtcataactgttttagtgtctggtaactcaatatcatacttttcgcaaaactctttgaggttatcagcaccactaacaccattatgagtgtcaatatcaattactgcaatacctgataacttaccagttaaaataccatagttgccaccttctgcaacccacttcttcacttctgctttatcttcaccattaaacgagccagcaactaaaggcgctttaccgttctttttaagtcttaatagttccattgtttatcctcctatgaacatgctacaattttagctgtttctaaattataactatttacttcaataataagtacatcaagaccatgtgtgttctccatcacttccaccatgtaatcttctgctaactcttttgtagtgaatgattctgattggtaagctagtgttttagtttcaaaatcaataacatttacaatatacatattatttcctccctaaaagtctttactgatagttactacttgaccgttatggtcaacctcttctgcaccccatgtgtctgtggtatcaatgaatttaaaaataaaacatgcaccaataaacataatgaatagtaagcagaaccacgcttgtatataatctttgtatgtgtttttataccacttttggtttttatcttctttagtaaacattgttgtttcctcctcttatcttatgtacctactatatcataggatatagtagttgtcaactatttaattgaataaaatactaaattttctaattttaaggtgaatgtttctgaatcaccaaaactaagttctaaaaaacgttgtgtgatatttacacgtttaacattggtaaataagatatttctattatctttaccagccataaagtttactgttacttcttttaattctttcattttaatatatcctccatcatttcattagtaaagtcttgaccgtttgtaactgtttcaaaaatctttttttctactggtgtttctggaattataaaatagtacattggttttttaccttgaccatgtctatcaatacgtgctttagactgtattaaatcaactgaacttaatggtaaactgttaaacaccattatattagatataacaaagtcattaatacctgttgaagctgatttgtagtgtgctaacacaacaccgttgtctttacctttaaattcttttaagtccttgctagcgccgttatattgactataggggcgctttatcttgtctaatacttgtttcaacatttcaagttctacattgtagttgtagaagataactactcgttcattgttatgtgtttctaaaatagcctgtaaacgctcaaacggttctttacttacttgtttattgattcctagcaagaaaccatgtgacacacagcgcattgcgttaaatagtttactactattatctaattcaatcacttcaccgttatccgccttgtacatgcgattctttttcaatttagcatacatagctggctttttagtcttatacacaaagtcctctggatagtaatctttatcacgtgtgaaacgcactgcgcattggtcaatcatttgttgtagtaaatgctcgttcttataacctacaatgtccataaatcgcatagaacccatttgtcgcatttgcttaataacaaatagttgctcaaactcttttttaggcttgcggaatacatttagcatatacagttgactatagtagttttctaactttccattgctaactggtgttgctgttaataatctaacataatttgttttctttgtcaacttcatagcaaacttagttactttagaggagctaacacctaccttgtgggcttcgtctaaaataatgaatgtgtctttgtctacccatttcaacaattcagttacacgccaactgctttcaaatgagattgcaactcgttttgattcagctaataactctttatttttctttgttcctttgttaagtggtgtaatatcaatacccatcaaagccccatcttctgcaaagtccgccacctttggggctaaacagataactaatagcttactacagccactttgcaggtaggcacctaaggcggtgaaggtcttccctgttccagcatcacttaaatcatatggtttttctttccactgtttaataccttcaatttgcgttggcaatagttcaatttttccaatcttagtcatatagtacttccaccctatcatctttaatatctggtaaatctggttgttcatatgtgtaataaatatcgtcaaaaccttgatactccctattgtctaattggtctaaatattgcaataagtcgtataaatcacctaagttatctcttaatagtaaaccatatccaccaacatgtctaacctcttgtaaatatctaatctgtaatgggtctggttgatagttgcctgttttaagttctaaagcgatataataccctaagtaacatgcttcaatgtctgcacgtccaacacggtcatatatggttgctgtgttaacatttactaatgcacctttagctttcaaatagtctactacttctctactaaatttagattcctttcccatagtttgaaccaccttttttattaccttgtaacatatttgttataagttcaataccttcttctacgtcaattccttgttggctgaatagtcctaacattgctaacgtaccatatgttaaatatttttccatgtcatcttgtgaaacccctttacttctgaaatcattttccatttcactcaaaatattatcaattgcaataatgcgttctgttttcattattattcttcctctccaattactaattcaattccgccccatgattcgttgtaactgatatttaatacctttgtcaactcattatacttattaaataatcgtgctactgacttatcacttgttgtgtcaattactagtgcagtcaaaccatttgattctttcactactaaaaaatgactgtcaaccacttcgtatgcttgtaataaattcattttagttatcctccttgaatgtttgtgttgctaagaatgttagtacaaatgatatagaccatgctatcattacagcatcccttgaaccggtgaatacgattgtaaagatacctactaaaaatgccaccaatacagctgttaaaacttctaaattttcattcatcttattttttcctccaagtcgttaattcgtttttctaattcaataattaattgttcattgtgtagtgttttagtgatacttgatacttcaatacctgaaacttccttatatttcaaaataatatcttgttgttggtcattcaaacctttgtataaccctagttcatcttttgtttcttcaagttgttctttcatatcagttatacccattgttgcggttgaaccagcgacaatgaatccacatactaatcctataattgttcctgtatttctacccttcattatttgtttacctccattacacttattgttaatactgctactaaagttaataatgttactactaatgttgttgtcattttaatttcctcctaattgattatatacttagtataaatgattgtttttattttgtcaagtgttttggtaaattaattttcaaatttttgtcataccgtctggggtcaagtgtcttgtgaacatcatctactttgtttaggtagcttgtaattactttaccacttaatagtgacaccacaatacactgtacttctttgtttactgcatagtgtgaacgtagtaaaatacgcttgtctgctcctgtttcgttgtactctacaattgtactatttaacatggttttcattgtcatttcatatgaaaatttagtttcaccatttctgattttatcttgtaagtgaaaaccgatcttaataccacgctttaaccataagtcttttacacgctctctagcattatatacttgttcaacttcattgtgtgtaaactgtgaagcgtgtttctttacttgtccttgcgttttctttactgttccaatttgaaagtccatctcatatcctcctcttaacttatgaactaagtatatcagttggggctgaacttgtcaaccccttttctgattttattttaagttttctaatactgtttcagttagtaaaatcacatctaacattttttctagtctatcgtttagttcatgtcctagttctttgtttccgttgtcgtatgcttcaatcatttgcgcttttaactcgtcatatcttttatttagtctttctaatttagcttcatatctttgttttgttgtcatgtttgtttcctcccttatctctatgaattaataataccatcaatgtaatagattgtcaacaatttttataaaataaaatcgttcttggtgcattttattttcaatgtcatatatcatcataattgttttaatttctgaaaccagtttacgaaattcatgttcataaaattcaacattagatacttgtttccaataccgttgtgtggtgtgtgattgcatgttttccttgtcgttcatttccattaatttcttggttgcgctatctcgttttttatctactttctttaattcagatactagatattttagaactactagatagtgtttatctagtagttcttcttttgtgcttaacatgtgtaatcaaccccacataatgaacacatttgttttaaaatcaattccacatctttctttgtgtgtggtgcgttgcattccattttttgaacttccatagcccattctctgtcacattccattagttccatgtatcttgtaatgaataattcttctaattcctcaattgtgttttctaattctacgtaatatggtttcatttcttaattcctcctcttaacttatgaattaagtatatcatgcgaaaaaaagaaagtcaactgttttagtcaactttctttaaaatattttagaaaatattatctgtttcagtaaagttgttagcccatttgatattggttagcacatactgtggttttccgttaactcgttttttaactctgtttaatacaatattctgcgatttacgttgtagttctggcacaaacttgcgagctgaaacggtcattagtccttcattaactaacatatcgttatatgcttctaataattcgtttgttgggataaatgagttttcatcttctacaaactcaatttcgttcatgtcaataaagtttgccattgtgtcattcccttggataaaggcatcacgcaatttatttgcattatcactggtccagaagtgtcctttggtttctccatttagtccaaatagtacatttctatattgttgtaaacagtagcttataaactctgatttttcttcatatgtgaaattctttgaacgttccagccacattgaatctgtggggttatctcttcccattgtcttgttaaatggtagtgtgataatacgacgtaagaaaccatgtgaggtgtctgaaaacgtaggcatgttattagttgtgaaaatcattagtgcgtagttcgtaaatgtgaacttgttaatacctttgtactctgcactcataacgtcattacctgataatgttttcagtgtacctgtttgtttaatatgctgtgctggcatatctgtttcaatattcaccattttaccaaataattgagagcttgcgaatttgtcattattacctgacaagctagctagtgttgcatgacttgtatttgattttcctactagttcctcaataaatgccataacgtgagatttaccgttactaccttcaccagttgcgaataccattgcttgtgggtcttggttgcggtagaaaatacgtccaatcaattggaaaagtgtttttgcgtcctcttctaaaatatactcaatccattcagcaacgatattgtgtttaggattctcaatataatcatattcaattcttgttgtttggtagtcctctttcacagttggttttaatgtgtcctctttaaagcggtatgttccatttttaaaggctattttgtttgggtccattttgtcattaaacggtaagttagcaccagaagcaagtgcattttttgccattctttggactgcatttctaaattggttagccacctttgcattttctgcataatgtggtgtataaaccatcataaactcattgtaaagcttttgccataaacgagcttctaagttgtcctctgatacctcatagatttttgtgtcatgattataaaccactggtaaaccaattgttgaacttgcatgcactggtaataccttagccatgtgaactgccaaggcttctgcgtttaaaccgtcataacttggttctggtcgttgtggttctgcattcttagccgcatctccatttttgaagtcaacttcccactctttgtggtccttctcatattctgacaatgccttgatatattgcttgcttggtgtcaaagtcttttcaagcgtgctgataaagcttaattcaattggttggtcatattctactttttgtaattcatttaccattgttattcctcctaatatcttatgacattaatataccatctaaaaaagagaaagtcaactgttttatttaactttctcccttatcataacatatttaatttagataatgtttctcaaataggtatataccaatagcaatcatgatagttagtaatgcacctaatccaagtacaacccatgctattggtttcaatgtcattagtattgaaattacaatcattgctgaaatcactattccacttgctgtccctaccaatacaagtgccactaataatacatctaatttactcattttgcttcctccttatgaaatttataaacatcatgtaatcgttcacgtaattcacttgattgttccatagtaataacatcactcatgctaagtcccaaaattacaccttggataaatttcataccagcgtggttgtgttctgcgttttcgtcatacccttcaatcatttctaaaacatgttcaattgcgctaatattactcatttttccacctcatctagttttttcaataatcttttttcattccacacatttacaatatctccaatatacttgacattgtatagccatctaaatttgtatggtaaaatcttgcatacatctttatattgatattcatacgcttgtggtacaccattctttaaaaaaatggttactgtagccccatcatatggttcttcaatttcatagtaacgttctgtgtacatgtctactctcatctgttttcctcctcaaattgttgtttctgttctttggttgcttttgtgtcacatatggtggcttgcttgtgtatccatgttttagaaaccatgtgtatctcattgtctaataatgtgataaaatagccacgtgtgtctatctggtcaattctgtaaatatttaacccatctgtggaagcccatattgagccaataacctttactgaatcactcactatgcgtcctccaatacatataggattgaatcaagtggaatggtgataaatgtgggttgcatttctccatcaatttcaatatcttctggtttgtctaacttcaataatttttcatcattttcaaccgcttcttcatacattacaagaattggttcttctgtgtataagttgaaatactcattgtttgttaagcaaatatgatagtttgttttggttgtcattattggtcctcctagtcctcagcacttaaattgaatgcgttgtttggatattcatcttccatactcaaatcaaatactttttgcattacttttcgtttactctctggcatattctcataaccatatcttgctatccaagcgttaaatacatctaataaatcaatcgcttcaccttgttcaagttctaaatacatcttgttttcctcctagtcctcaatatacttgataatgttgtaagttccccagattccaattgttacaaatgctaaaccaaatagtgccatgtttgtttcctccttagttatcttatacacctactataccatcatatatagtaggtgtcaagtgtttattcaaattctttgatagtttcaatcagtttgttaagtttgcgtgcctttttgtttaagtcaattgcctgttgctccaagcggtcacgctttttgaataagtgttctgcttcattgttaagttcatcaattttagcttgtacactagacttcaagtctatagttgttttaaaagttggtttttctactaattcgtactgttcttctgaaatgtaatattttgggtggttctcatttaaataaatacggcagtcatcattataagggttatcatatgatataattttatattctttaccaatttctaaaccattcattctgtcagcatataatccgtcgtattttgtaattttagcatattttgtcatttacttttcctccaattcgttaattcgttgttcatattgtaaaacaattctgtcaactgtttctagttcactgtgtattgcatttaacttatcatgtaattctttgtttcgttctttgtacatgtcactttcactttttaggtctaatacttcatcatctaatttgtcaagttctttttcaagattgtttttagtgtctaataaccggttgtaatcctctttcaatttattatatttcttctttcttactaacatttgttttcctcccttatctctatgaaaccatgtatttcatttacttttcctccaattcgttaattcgtttttcatattctaaaacaacttcgtcagttctgtttagctctccaagtgttttgataaacttttgccaacactcttcgtatttttccttatatctgtcacgttcaagttctaggtcaaatacttcatcatctgctttgtcaagttctttttcaagtctgttaatccattgttctaacttaatgttgtttgatttgcttttattgtaagcttctttccaagtgtccctatcatctactaactcattgtagttcttaatcaataaatcatgttttttctttgttactaacatttttaattcctcctctacaatttccatctttactagtgcttcaccgttcaaataccgtaaaatatcacctgttgggcgatcactacgaaccccatctcctttaataactaagccaacatattcactttcttcaacttcgtagatacctccttttgtccaaaagtcgtatctaccagcatctgtgcaacgcaatttcatacctttgtataagtctttttctgtgtatttcatttcttcttcctcccttatctctatgaaaccatcttaccatgattatttttggttgtcaacacttttatcaatcttttctaattcatttagaatttccattgcttccattcttctaattcgtagagtttgcaactctacttcaatatatgggtcgtttctacgctcattgcaccatgcgattgtcatattaaagtttataattcggttttgaattgcttttgtgtattgcgtcgctttgtcctcattcatctttattcttcctcccattcaatttgtttgattgatactaaaccaagtgttgtgaaatacttgtattcttcgtcccactctctaaactgtgttaaaagtggttttccactactatatgattctatttgctcacaattacgttcttcaatttgttcttcaattttatctaccatttcattgtaatatttgagcgcactctcatatgaactgaaccctctcattgctggcactttataatctacttttactaaccatgcggttttcattctacacgcccccaaagttctttaatagtttcaatcattaaatcttgttcaagttcaacttctttacatacatgaattaagccagtcattaacatgtaaatcacgtctacttcatctacgtggttactattgatactcaactctttgttttcatcaagtgttagtaatactttctctgtcattactcattacctcctttaaacacttcatcatataattcttggattgcttcacgtttcacttttaacattgcaatttgtgctgatattacattacttggctttcctatcaaatgtcctgacaaatgaccaatatccatattgtattgaataagtgttcgttgaaatgtttttctaatcttagtgagttcatcaatgttgaccaagttaaaatttgaatcccaaaattgatttaggttgtgttctaagtcaaatggtgttgttccgtattctaatatgtcaccttcatcacatttaatatagaaacctgtttcattctttagaatgtcatactctttaccttctgtgtaaaatggttcttgtgggtggctacttgtgcatttcatttttaaatctttgtattctgtcattttaggtcctccttataattgtttactatagcaaccgtttattttaacaccaatgaaaccatattctagttctccatttactcgtaagcgtgttctttctaaattagtaccaccatcttttgcaacctctttaaatagtggaataaataatttgtgtgaaatgtttgaatcgttccaatcgttgaagtcatcaagtaacattgtactgctcgtaaatactaccccatactcactgtagtgtaattttcttgctgtacaccagagtttgacacgttctttcatatgtctgttaaattctggttcttttcgctcttgtaacacatcatactctgtaataatgtagtgccactcaccttgtatagtatgtgagataatagttgtgttctcgtctagtgattcaatgtattctgttacattgttcattccacaaaattctttgattgtctttttcttcatattattttcctcctcgtttgtttataattgttgtggtttacatttactatactaaaccatgttgattaatttgtcaatagttttgtttaaattaatttaaaaataatgaaaccagttgaaaagttctctattcatcttgaatgaagaaccaagataaaccttagagccacaagggatttaaccaaagtgttcttcattggaggtatttttactactcacctaccagaaacacttttcttttttatatttttctacagatagagtagaattttgggagaacacagagaactttttagtataaatgagtaaagagtattggtttatcaacgtttataggcgttctcggtatgagtggttaggtaacgcaaccgagaaccaaccgagaacacagagaaccaatgaagaacatttcatacatcttaatgattaatctattccctaaagcacaaataagtatgctataatatagaagtaaagtaaaaacaaaaaggaggaatcaattatgaataaagcaatccaattagtagtagcactaatcatcttagtatttacagtagtaatggcaggagtaatgtatgtgtatctaccctatgtattgtggacatcaggcaacactggtttagctattgtctatatcttatggaatgtatttggacctatgctattaaaacgtatgaagtccacactagagggatacaacaactaagcaccaccatatacaacagagagtggagggtataggttaatactgtacccttgagaatacaacatagaggagggtatactatatgaccatggagggtatgacagacaagcaactactatctcatactaagttagagttagtatcatacatcagacagttagagcaaccaatggttaccaacacatcacacacaacagaacaaccaacaacagaaccaacaaccaaacctaaagtatcttatgacatcttaagcaccatcaataacaacaaagatatgtggggcttctaatgcctaagcgacggtgtaaggttgcacactgcagggagtatgtagacataccagaagtatactgtgaagaacacaaaggtaatacacaacgaacatacaacaagcaagtaagacattcaccagacaacaagaagtatgcggacttctacgcatcaacactgtggcgaaacgtgagagcaagaaagctttcaatgaatccaatgtgtgaagtatgtaatagtacaatagcaaccattgtccatcataggcaagagatacgtacctcaatgggttggcgacataggttagatatagataacctagaaagtatctgtcaggaatgccacaacaaagaagaccattcagccagcttccgcaaccgcaaggggtgattgtaggtaggtgtagggctatcagattttaaaaagtgggagggagtaggaaattaaaatgggagggagtcgctaaaatttttagaccccccctcatttttttgaagaaactaat
